(19) United States
(12) Patent Application Publication
(10) Pub. No.: US 2025/0283079 A1
(43) Pub. Date: Sep. 11, 2025

(54) ACTIN-BINDING LIM PROTEIN 3 (ABLIM3) iRNA AGENT COMPOSITIONS AND METHODS OF USE THEREOF

(71) Applicant: ALNYLAM PHARMACEUTICALS, INC., CAMBRIDGE, MA (US)

(72) Inventors: KIRK BROWN, SWAMPSCOTT, MA (US); JEFFREY ZUBER, SOMERVILLE, MA (US)

(73) Assignee: ALNYLAM PHARMACEUTICALS, INC., CAMBRIDGE, MA (US)

(21) Appl. No.: 18/862,839

(22) PCT Filed: May 3, 2023
(86) PCT No.: PCT/US2023/066573

§ 371 Date: Nov. 4, 2024

Related U.S. Application Data
(60) Provisional application No. 63/338,645, filed on May 5, 2022.
(60) Provisional application No. 63/352,573, filed on Jun. 15, 2022.

(51) Int. Cl. C12N 15/113

(52) U.S. Cl. CPC C12N 15/113; C12N 2310/14; C12N 2310/315; C12N 2310/321; C12N 2310/322; C12N 2310/351; C12N 2310/3515

(57) ABSTRACT

The disclosure relates to double stranded ribonucleic acid (dsRNAi) agents and compositions targeting a Actin binding LIM protein 3 (ABLIM3) gene, as well as methods of inhibiting expression of an ABLIM3 gene and methods of treating subjects having an ABLIM3-associated disease or disorder, e.g., PTSD or age-related memory loss, using such dsRNAi agents and compositions.

### CROSS-REFERENCE TO RELATED APPLICATIONS

[0001] This application claims the benefit of priority to U.S. Provisional Application No. 63/338,645, filed on May 5, 2022, and claims the benefit of priority to U.S. Provisional Application No. 63/352,573, filed on Jun. 15, 2022. The entire contents of the foregoing applications are hereby incorporated herein by reference.

### SEQUENCE LISTING

[0002] The instant application contains a Sequence Listing which has been submitted electronically in XML format and is hereby incorporated by reference in its entirety. The XML copy, created on May 2, 2023, is named A108868_1570WO_SL.xml and is 4,029,028 bytes in size.

### BACKGROUND OF THE INVENTION

[0003] The actin binding LIM protein 3 (ABLIM3) gene encoding the actin binding LIM protein 3 protein is located in the chromosomal region 5q32 on chromosome 5. ABLIM3 is part of the actin binding LIM family of proteins which are characterized by an N-terminal LIM domain and a C-terminal dematin-like domain.

[0004] ABLIM3 is expressed in the brain and also expressed in other tissues, such as in fat tissue, heart, placenta, and liver. ABLIM3 can bind to the actin cytoskeleton, localizes to adherens junctions, stabilizes branched F-actin, and also functions as a protein binding interface through its LIM domain.

[0005] ABLIM3 has recently been implicated in memory as a molecular brake in connectivity of dentate granule cells and stratum lucidum interneurons. Upon learning, the levels of ABLIM3 decrease resulting in improved remote memory precision and a decrease in generalization of remote fear memories. Accordingly, ABLIM3 may play a role in post-traumatic stress disorder (PTSD) and age-related memory loss.

[0006] The current treatments for PTSD and age-related memory loss are limited and have low efficacy. Accordingly, there is a need for agents that can treat, prevent, and/or inhibit the progression or the formation of PTSD and age-related memory loss.

### BRIEF SUMMARY OF THE INVENTION

[0007] The present disclosure provides RNAi compositions, which effect the RNA-induced silencing complex (RISC)-mediated cleavage of RNA transcripts of an ABLIM3 gene. The ABLIM3 gene may be within a cell, e.g., a cell within a subject, such as a human. The use of these iRNAs enables the targeted degradation of mRNAs of the corresponding gene (ABLIM3 gene) in mammals.

[0008] The iRNAs of the invention have been designed to target an ABLIM3 gene, e.g., an ABLIM3 wild type gene and/or an ABLIM3 gene variant. The iRNAs of the invention inhibit the expression of the ABLIM3 gene by at least about 30%, 35%, 40%, 45%, 50%, 55%, 60%, 65%, 70%, 75%, 80%, 85%, 90%, 95%, or 99%. Without intending to be limited by theory, it is believed that a combination or sub-combination of the foregoing properties and the specific target sites, or the specific modifications in these iRNAs confer to the iRNAs of the invention improved efficacy, stability, potency, durability, and safety. In one aspect, the present invention provides double stranded ribonucleic acid (dsRNA) agent for inhibiting expression of ABLIM3, wherein the dsRNA agent comprises a sense strand and an antisense strand forming a double stranded region, wherein the sense strand comprises at least 15 contiguous nucleotides differing by no more than 3 nucleotides from the nucleotide sequence of SEQ ID NO: 1 and the antisense strand comprises at least 15 contiguous nucleotides differing by no more than 3 nucleotides from the nucleotide sequence of SEQ ID NO: 2.

[0009] In another aspect, the present invention provides a double stranded ribonucleic acid (dsRNA) agent for inhibiting expression of ABLIM3, wherein the dsRNA agent comprises a sense strand and an antisense strand forming a double stranded region, wherein the antisense strand comprises a region of complementarity to an mRNA encoding ABLIM3, and wherein the region of complementarity comprises at least 15 contiguous nucleotides differing by no more than 3 nucleotides from the nucleotide sequence of SEQ ID NO:2.

[0010] In yet another aspect, the present invention provides a double stranded ribonucleic acid (dsRNA) agent for inhibiting expression of ABLIM3, wherein the dsRNA agent comprises a sense strand and an antisense strand forming a double stranded region, wherein the antisense strand comprises a region of complementarity to an mRNA encoding ABLIM3, and wherein the region of complementarity comprises at least 15 contiguous nucleotides differing by no more than 3 nucleotides from any one of the antisense nucleotide sequences in Tables 3 or 4.

[0011] In one embodiment, the sense strand comprises at least 15 contiguous nucleotides differing by no more than three nucleotides from any one of the nucleotide sequence of nucleotides 82-102, 134-154, 232-252, 276-296, 293-313, 326-346, 351-371, 366-386, 381-401, 414-434, 482-502, 500-520, 542-562, 558-578, 582-602, 622-642, 674-694, 692-712, 713-733, 728-748, 743-763, 779-799, 887-907, 942-962, 983-1003, 1001-1021, 1082-1102, 1102-1122, 1117-1137, 1177-1197, 1192-1212, 1242-1262, 1269-1289, 1313-1333, 1344-1364, 1359-1379, 1374-1394, 1408-1428, 1437-1457, 1550-1570, 1594-1614, 1624-1644, 1645-1665, 1674-1694, 1715-1735, 1746-1766, 1767-1787, 1812-1832, 1859-1879, 1884-1904, 1912-1932, 1935-1955, 1971-1991, 2039-2059, 2096-2116, 2127-2147, 2169-2189, 2184-2204, 2218-2238, 2245-2265, 2273-2293, 2325-2345, 2343-2363, 2385-2405, 2422-2442, 2459-2479, 2483-2503, 2520-2540, 2535-2555, 2561-2581, 2585-2605, 2667-2687, 2703-2723, 2729-2749, 2764-2784, 2788-2808, 2830-2850, 2861-2881, 2885-2905, 2937-2957, 2958-2978, 2974-2994, 3011-3031, 3044-3064, 3061-3081, 3079-3099, 3110-3130, 3146-3166, 3203-3223, 3220-3240, 3279-3299, 3303-3323, 3321-3341, 3338-3358, 3388-3408, 3407-3427, 3422-3442, 3437-3457, 3452-3472, 3532-3552, 3548-3568, 3579-3599, 3594-3614, 3626-3646, 3644-3664, 3682-3702, 3706-3726, 3721-3741, 3746-3766, 3763-3783, 3796-3816, 3814-3834, 3849-3869, 3866-3886, 3897-3917, 3919-3939, 3986-4006, 4018-4038, 4037-4057, 4058-4078, 4084-4104, 4099-4119, 4131-4151, 4159-4179, 4225-4245, 4241-4261, 4276-4296, 4291-4311, 4306-4326, 4336-4356, 4354-4374, 4369-4389, 4387-4407, 4404-4424, or 4421-4441 of SEQ ID NO: 1, and the antisense strand comprises at least 15 contiguous nucleotides from the corresponding nucleotide sequence of SEQ ID NO: 2.

[0012] In one embodiment, the antisense strand comprises at least 15 contiguous nucleotides differing by no more than three nucleotides from any one of the antisense strand nucleotide sequences of a duplex selected from the group consisting of AD-1807455, AD-1807481, AD-1807539, AD-1807561. AD-1807578, AD-1807591, AD-1807616, AD-1807631, AD-1807646, AD-1807659, AD-1807707, AD-1807725, AD-1807764, AD-1807780, AD-1807804, AD-1807844, AD-1807870, AD-1807888, AD-1807889, AD-1807904, AD-1807919, AD-1807955, AD-1808063, AD-1808098, AD-1808139, AD-1808157, AD-1808238, AD-1808258, AD-1808273, AD-1808312, AD-1808327, AD-1808356, AD-1808383, AD-1808407, AD-1808418, AD-1808433, AD-1808448, AD-1808482, AD-1808511, AD-1808561, AD-1808598, AD-1808628, AD-1808649, AD-1808678, AD-1808698, AD-1808727, AD-1808748, AD-1808773, AD-1808789, AD-1808814, AD-1808842, AD-1808865, AD-1808901, AD-1808941, AD-1808978, AD-1809009, AD-1809051, AD-1809066, AD-1809080, AD-1809107, AD-1809135, AD-1809187, AD-1809205, AD-1809246, AD-1809283, AD-1809293, AD-1809317, AD-1809354, AD-1809369, AD-1809395, AD-1809414, AD-1809456, AD-1809472, AD-1809498, AD-1809511, AD-1809535, AD-1809550, AD-1809561, AD-1809585, AD-1809596, AD-1809617, AD-1809633, AD-1809670, AD-1809702, AD-1809719, AD-1809737, AD-1809757, AD-1809773, AD-1809822, AD-1809839, AD-1809895, AD-1809919, AD-1809937, AD-1809954, AD-1810004, AD-1810023, AD-1810038, AD-1810053, AD-1810068, AD-1810127, AD-1810143, AD-1810174, AD-1810189, AD-1810221, AD-1810239, AD-1810255, AD-1810277, AD-1810292, AD-1810296, AD-1810313, AD-1810345, AD-1810363, AD-1810398, AD-1810415, AD-1810446, AD-1810468, AD-1810494, AD-1810526, AD-1810545, AD-1810566, AD-1810591, AD-1810606, AD-1810638, AD-1810666, AD-1810676, AD-1810692, AD-1810727, AD-1810742, AD-1810757, AD-1810767, AD-1810785, AD-1810800, AD-1810818, AD-1810822, and AD-1810839.

[0013] In some embodiments, the nucleotide sequence of the sense and antisense strand comprises any one of the sense strand nucleotide sequences in Tables 3 or 4.

[0014] In one embodiment, the sense strand, the antisense strand, or both the sense strand and the antisense strand is conjugated to one or more lipophilic moieties.

[0015] In one embodiment, the lipophilic moiety is conjugated to one or more internal positions in the double stranded region of the dsRNA agent.

[0016] In one embodiment, the lipophilic moiety is conjugated via a linker or carrier.

[0017] In one embodiment, the lipophilicity of the lipophilic moiety, measured by log Kow, exceeds 0.

[0018] In one embodiment, the hydrophobicity of the double-stranded RNAi agent, measured by the unbound fraction in a plasma protein binding assay of the double-stranded RNAi agent, exceeds 0.2.

[0019] In one embodiment, the plasma protein binding assay is an electrophoretic mobility shift assay using human serum albumin protein.

[0020] In some embodiments, the dsRNA agent comprises at least one modified nucleotide.

[0021] In one embodiment, no more than five of the sense strand nucleotides and no more than five of the nucleotides of the antisense strand are unmodified nucleotides

[0022] In one embodiment, all of the nucleotides of the sense strand and all of the nucleotides of the antisense strand are modified nucleotides.

[0023] In one embodiment, at least one of the modified nucleotides is selected from the group a deoxy-nucleotide, a 3′-terminal deoxythimidine (dT) nucleotide, a 2′-O-methyl modified nucleotide, a 2′-fluoro modified nucleotide, a 2′-deoxy-modified nucleotide, a locked nucleotide, an unlocked nucleotide, a conformationally restricted nucleotide, a constrained ethyl nucleotide, an abasic nucleotide, a 2′-amino-modified nucleotide, a 2′-O-allyl-modified nucleotide, 2′-C-alkyl-modified nucleotide, 2′-hydroxyl-modified nucleotide, a 2′-methoxyethyl modified nucleotide, a 2′-O-alkyl-modified nucleotide, a morpholino nucleotide, a phosphoramidate, a non-natural base comprising nucleotide, a tetrahydropyran modified nucleotide, a 1,5-anhydrohexitol modified nucleotide, a cyclohexenyl modified nucleotide, a nucleotide comprising a 5′-phosphorothioate group, a nucleotide comprising a 5′-methylphosphonate group, a nucleotide comprising a 5′ phosphate or 5′ phosphate mimic, a nucleotide comprising vinyl phosphonate, a glycol nucleic acid (GNA) (e.g., a nucleotide comprising adenosine-glycol nucleic acid (GNA)), an S-glycol nucleic acid (S-GNA) (e.g., a nucleotide comprising thymidine-glycol nucleic acid (GNA) S-Isomer), a nucleotide comprising 2-hydroxymethyl-tetrahydrofurane-5-phosphate, a nucleotide comprising 2′-deoxythymidine-3′phosphate, a nucleotide comprising 2′-deoxyguanosine-3′-phosphate, a nucleotide comprising a 2′ phosphate (“3′-RNA”, e.g., G2p, C2p, A2p, U2p), and a terminal nucleotide linked to a cholesteryl derivative and a dodecanoic acid bisdecylamide group; and combinations thereof.

[0024] In one embodiment, the modified nucleotide is selected from the group consisting of a 2′-deoxy-2′-fluoro modified nucleotide, a 2′-deoxy-modified nucleotide, 3′-terminal deoxythimidine nucleotides (dT), a locked nucleotide, an abasic nucleotide, a 2′-amino-modified nucleotide, a 2′-alkyl-modified nucleotide, a morpholino nucleotide, a phosphoramidate, and a non-natural base comprising nucleotide.

[0025] In one embodiment, the modified nucleotide comprises a short sequence of 3′-terminal deoxythimidine nucleotides (dT).

[0026] In one embodiment, the modifications on the nucleotides are 2′-O-methyl, GNA and 2′fluoro modifications.

[0027] In some embodiments, the dsRNA agent further comprises at least one phosphorothioate internucleotide linkage.

[0028] In one embodiment, the dsRNA agent comprises 6-8 phosphorothioate internucleotide linkages.

[0029] In one embodiment, each strand is no more than 30 nucleotides in length.

[0030] In one embodiment, at least one strand comprises a 3′ overhang of at least 1 nucleotide. In another embodiment, at least one strand comprises a 3′ overhang of at least 2 nucleotides.

[0031] The double stranded region may be 15-30 nucleotide pairs in length; 17-23 nucleotide pairs in length; 17-25 nucleotide pairs in length; 23-27 nucleotide pairs in length; 19-21 nucleotide pairs in length; or 21-23 nucleotide pairs in length.

[0032] Each strand may have 19-30 nucleotides; 19-23 nucleotides; or 21-23 nucleotides.

[0033] In one embodiment, one or more lipophilic moieties are conjugated to one or more internal positions on at least one strand, such as via a linker or carrier.

[0034] In one embodiment, the internal positions include all positions except the terminal two positions from each end of the at least one strand.

[0035] In another embodiment, the internal positions include all positions except the terminal three positions from each end of the at least one strand.

[0036] In one embodiment, the internal positions exclude a cleavage site region of the sense strand.

[0037] In one embodiment, the internal positions include all positions except positions 9-12, counting from the 5′-end of the sense strand.

[0038] In another embodiment, the internal positions include all positions except positions 11-13, counting from the 3′-end of the sense strand.

[0039] In one embodiment, the internal positions exclude a cleavage site region of the antisense strand.

[0040] In one embodiment, the internal positions include all positions except positions 12-14, counting from the 5′-end of the antisense strand.

[0041] In one embodiment, the internal positions include all positions except positions 11-13 on the sense strand, counting from the 3′-end, and positions 12-14 on the antisense strand, counting from the 5′-end.

[0042] In one embodiment, the one or more lipophilic moieties are conjugated to one or more of the internal positions selected from the group consisting of positions 4-8 and 13-18 on the sense strand, and positions 6-10 and 15-18 on the antisense strand, counting from the 5′ end of each strand.

[0043] In another embodiment, the one or more lipophilic moieties are conjugated to one or more of the internal positions selected from the group consisting of positions 5, 6, 7, 15, and 17 on the sense strand, and positions 15 and 17 on the antisense strand, counting from the 5′-end of each strand.

[0044] In one embodiment, the internal positions in the double stranded region exclude a cleavage site region of the sense strand.

[0045] In one embodiment, the sense strand is 21 nucleotides in length, the antisense strand is 23 nucleotides in length, and the lipophilic moiety is conjugated to position 21, position 20, position 15, position 1, position 7, position 6, or position 2 of the sense strand or position 16 of the antisense strand.

[0046] In one embodiment, the lipophilic moiety is conjugated to position 21, position 20, position 15, position 1, or position 7 of the sense strand.

[0047] In another embodiment, the lipophilic moiety is conjugated to position 21, position 20, or position 15 of the sense strand.

[0048] In yet another embodiment, the lipophilic moiety is conjugated to position 20 or position 15 of the sense strand.

[0049] In one embodiment, the lipophilic moiety is conjugated to position 16 of the antisense strand.

[0050] In one embodiment, the lipophilic moiety is an aliphatic, alicyclic, or polyalicyclic compound.

[0051] In one embodiment, the lipophilic moiety is selected from the group consisting of lipid, cholesterol, retinoic acid, cholic acid, adamantane acetic acid, 1-pyrene butyric acid, dihydrotestosterone, 1,3-bis-O(hexadecyl)glycerol, geranyloxyhexyanol, hexadecylglycerol, borneol, menthol, 1,3-propanediol, heptadecyl group, palmitic acid, myristic acid, O3-(oleoyl) lithocholic acid, O3-(oleoyl)cholenic acid, dimethoxytrityl, or phenoxazine.

[0052] In one embodiment, the lipophilic moiety contains a saturated or unsaturated C4-C30 hydrocarbon chain, and an optional functional group selected from the group consisting of hydroxyl, amine, carboxylic acid, sulfonate, phosphate, thiol, azide, and alkyne.

[0053] In one embodiment, the lipophilic moiety contains a saturated or unsaturated C6-C18 hydrocarbon chain.

[0054] In one embodiment, the lipophilic moiety contains a saturated or unsaturated C16 hydrocarbon chain.

[0055] In one embodiment, the ligand is conjugated at the 2′-position of a nucleotide or modified nucleotide within the sense or antisense strand. For example, a C16 ligand may be conjugated as shown in the following structure:

[chemical structure]

where * denotes a bond to an adjacent nucleotide, and B is a nucleobase or a nucleobase analog, optionally where B is adenine, guanine, cytosine, thymine or uracil.

[0056] In one embodiment, the saturated or unsaturated C16 hydrocarbon chain is conjugated to position 6, counting from the 5′-end of the strand.

[0057] In one embodiment, the lipophilic moiety is conjugated via a carrier that replaces one or more nucleotide(s) in the internal position(s) or the double stranded region.

[0058] In one embodiment, the carrier is a cyclic group selected from the group consisting of pyrrolidinyl, pyrazolinyl, pyrazolidinyl, imidazolinyl, imidazolidinyl, piperidinyl, piperazinyl, [1,3]dioxolanyl, oxazolidinyl, isoxazolidinyl, morpholinyl, thiazolidinyl, isothiazolidinyl, quinoxalinyl, pyridazinonyl, tetrahydrofuranyl, and decalinyl; or is an acyclic moiety based on a serinol backbone or a diethanolamine backbone.

[0059] In one embodiment, the lipophilic moiety is conjugated to the double-stranded iRNA agent via a linker containing an ether, thioether, urea, carbonate, amine, amide, malcimide-thioether, disulfide, phosphodiester, sulfonamide linkage, a product of a click reaction, or carbamate.

[0060] In one embodiment, the lipophilic moiety is conjugated to a nucleobase, sugar moiety, or internucleosidic linkage.

[0061] In one embodiment, the lipophilic moiety or targeting ligand is conjugated via a bio-cleavable linker selected from the group consisting of DNA, RNA, disulfide, amide, functionalized monosaccharides or oligosaccharides of galactosamine, glucosamine, glucose, galactose, mannose, and combinations thereof.

[0062] In one embodiment, the 3′ end of the sense strand is protected via an end cap which is a cyclic group having an amine, said cyclic group being selected from the group consisting of pyrrolidinyl, pyrazolinyl, pyrazolidinyl, imidazolinyl, imidazolidinyl, piperidinyl, piperazinyl, [1,3]dioxolanyl, oxazolidinyl, isoxazolidinyl, morpholinyl, thiazolidinyl, isothiazolidinyl, quinoxalinyl, pyridazinonyl, tetrahydrofuranyl, and decalinyl.

[0063] In one embodiment, the targeting ligand is a GalNAc conjugate.

[0064] In one embodiment, the dsRNA agent further comprises a terminal, chiral modification occurring at the first internucleotide linkage at the 3′ end of the antisense strand, having the linkage phosphorus atom in Sp configuration, a terminal, chiral modification occurring at the first internucleotide linkage at the 5′ end of the antisense strand, having the linkage phosphorus atom in Rp configuration, and a terminal, chiral modification occurring at the first internucleotide linkage at the 5′ end of the sense strand, having the linkage phosphorus atom in either Rp configuration or Sp configuration.

[0065] In another embodiment, the dsRNA agent further comprises a terminal, chiral modification occurring at the first and second internucleotide linkages at the 3′ end of the antisense strand, having the linkage phosphorus atom in Sp configuration, a terminal, chiral modification occurring at the first internucleotide linkage at the 5′ end of the antisense strand, having the linkage phosphorus atom in Rp configuration, and a terminal, chiral modification occurring at the first internucleotide linkage at the 5′ end of the sense strand, having the linkage phosphorus atom in either Rp or Sp configuration.

[0066] In yet another embodiment, the dsRNA agent further comprises a terminal, chiral modification occurring at the first, second and third internucleotide linkages at the 3′ end of the antisense strand, having the linkage phosphorus atom in Sp configuration, a terminal, chiral modification occurring at the first internucleotide linkage at the 5′ end of the antisense strand, having the linkage phosphorus atom in Rp configuration, and a terminal, chiral modification occurring at the first internucleotide linkage at the 5′ end of the sense strand, having the linkage phosphorus atom in either Rp or Sp configuration.

[0067] In another embodiment, the dsRNA agent further comprises a terminal, chiral modification occurring at the first, and second internucleotide linkages at the 3′ end of the antisense strand, having the linkage phosphorus atom in Sp configuration, a terminal, chiral modification occurring at the third internucleotide linkages at the 3′ end of the antisense strand, having the linkage phosphorus atom in Rp configuration, a terminal, chiral modification occurring at the first internucleotide linkage at the 5′ end of the antisense strand, having the linkage phosphorus atom in Rp configuration, and a terminal, chiral modification occurring at the first internucleotide linkage at the 5′ end of the sense strand, having the linkage phosphorus atom in either Rp or Sp configuration.

[0068] In another embodiment, the dsRNA agent further comprises a terminal, chiral modification occurring at the first, and second internucleotide linkages at the 3′ end of the antisense strand, having the linkage phosphorus atom in Sp configuration, a terminal, chiral modification occurring at the first, and second internucleotide linkages at the 5′ end of the antisense strand, having the linkage phosphorus atom in Rp configuration, and a terminal, chiral modification occurring at the first internucleotide linkage at the 5′ end of the sense strand, having the linkage phosphorus atom in either Rp or Sp configuration.

[0069] In one embodiment, the dsRNA agent further comprises a phosphate or phosphate mimic at the 5′-end of the antisense strand.

[0070] In one embodiment, the phosphate mimic is a 5′-vinyl phosphonate (VP).

[0071] In one embodiment, the base pair at the 1 position of the 5′-end of the antisense strand of the duplex is an AU base pair.

[0072] In one embodiment, the sense strand has a total of 21 nucleotides and the antisense strand has a total of 23 nucleotides.

[0073] In another aspect, the present invention provides a double stranded ribonucleic acid (dsRNA) agent for inhibiting expression of actin binding LIM protein 3 (ABLIM3) in a cell, wherein the dsRNA agent comprises a sense strand and an antisense strand forming a double stranded region. The sense strand comprises a nucleotide sequence of any one of the agents in Table 3 or 4 and the antisense strand comprises a nucleotide sequence of any one of the agents in Table 3 or 4. Substantially all of the nucleotides of the sense strand and substantially all of the nucleotides of the antisense strand are modified nucleotides, and the dsRNA agent is conjugated to a ligand.

[0074] In various embodiments of the aforementioned dsRNA agents, the dsRNA agent targets a hotspot region of an mRNA encoding ABLIM3. In one embodiment, the hotspot region comprises nucleotides 3042-3081, 3420-3457, 4223-4261, 726-763, 1080-1137, 1342-1379, 1910-1955, 2167-2204, 480-520, 1080-1122, 1622-1665, 1744-1787, 2323-2363, 540-578, 1175-1212, 274-313, 349-401, or 2518-2555 of SEQ ID NO: 1. The dsRNA agent may be selected from the group consisting of AD-1809702, AD-1809719, AD-1810038, AD-1810053, AD-1810676, AD-1810692, AD-1807904, AD-1807919, AD-1808238, AD-1808258, AD-1808273, AD-1808418, AD-1808433, AD-1808842, AD-1808865, AD-1809051, AD-1809066, AD-1807707, AD-1807725, AD-1808628, AD-1808649, AD-1808727, AD-1808748, AD-1809187, AD-1809205, AD-1807764, AD-1807780, AD-1808312, AD-1808327, AD-1807561, AD-1807578, AD-1807616, AD-1807631, AD-1807646, AD-1809354, and AD-1809369.

[0075] In another aspect, the present invention provides a dsRNA agent that targets a hotspot region of an actin binding LIM protein 3 (ABLIM3) mRNA.

[0076] The present invention also provides cells and pharmaceutical compositions for inhibiting expression of a gene encoding ABLIM3 comprising the dsRNA agents of the invention.

[0077] In one embodiment, the dsRNA agent is in an unbuffered solution, such as saline or water.

[0078] In another embodiment, the dsRNA agent is in a buffer solution, such as a buffer solution comprising acetate, citrate, prolamine, carbonate, or phosphate or any combination thereof; or phosphate buffered saline (PBS).

[0079] In one aspect, the present invention provides a method of inhibiting expression of an ABLIM3 gene in a cell, the method comprising contacting the cell with a dsRNA agent of the invention, or a pharmaceutical composition of the invention, thereby inhibiting expression of the ABLIM3 gene in the cell.

[0080] In one embodiment, the cell is within a subject.

[0081] In one embodiment, the cell is a central nervous system (CNS) cell. In another embodiment, the cell is a brain cell. In certain embodiments, the cell is an astrocyte, neuron, or oligodendrocyte.

[0082] In one embodiment, the subject is a human.

[0083] In one embodiment, the subject has an ABLIM3-associated disorder.

[0084] In one embodiment, the subject has post-traumatic stress disorder (PTSD). In one embodiment, the subject has age-related memory loss.

[0085] In one embodiment, contacting the cell with the dsRNA agent inhibits the expression of ABLIM3 by at least 30%.

[0086] In one embodiment, inhibiting expression of ABLIM3 decreases ABLIM3 protein level in serum of the subject by at least 30%.

[0087] In one aspect, the present invention provides method of treating a subject having a disorder that would benefit from reduction in ABLIM3 expression, comprising administering to the subject a therapeutically effective amount of a dsRNA agent of the invention, or a pharmaceutical composition of the invention, thereby treating the subject having the disorder that would benefit from reduction in ABLIM3 expression.

[0088] In another aspect, the present invention provides a method of preventing at least one symptom or sign in a subject having a disorder that would benefit from reduction in ABLIM3 expression, comprising administering to the subject a prophylactically effective amount of a dsRNA agent of the invention, or a pharmaceutical composition of the invention, thereby preventing at least one symptom or sign in the subject having the disorder that would benefit from reduction in ABLIM3 expression.

[0089] In another aspect, the present invention provides a method of preventing a subject from having a disorder that would benefit from reduction in ABLIM3 expression, comprising administering to the subject a prophylactically effective amount of the dsRNA agent of the invention, or the pharmaceutical composition of the invention, thereby preventing the subject from having the disorder that would benefit from reduction in ABLIM3 expression.

[0090] In one embodiment, the disorder is an ABLIM3-associated disorder.

[0091] In one embodiment, the disorder is post-traumatic stress disorder (PTSD).

[0092] In one embodiment, the disorder is age-related memory loss.

[0093] In one embodiment, the subject is human.

[0094] In one embodiment, the administration of the agent to the subject causes improved memory, or a decrease in anxiety, depression, fear, agitation, hostility, and/or distress.

[0095] In one embodiment, the dsRNA agent is administered to the subject at a dose of about 0.01 mg/kg to about 50 mg/kg.

[0096] In one embodiment, the dsRNA agent is administered to the subject subcutaneously.

[0097] In another embodiment, the dsRNA agent is administered to the subject intrathecally.

[0098] In one embodiment, the methods of the invention further comprise determining the level of ABLIM3 in a sample(s) from the subject.

[0099] In one embodiment, the level of ABLIM3 in the subject sample(s) is an ABLIM3 protein level in a blood, serum, or cerebrospinal fluid sample(s).

[0100] In one embodiment, the methods of the invention further comprise administering to the subject an additional therapeutic agent.

[0101] In one aspect, the present invention provides a kit comprising a dsRNA agent of the invention, or a pharmaceutical composition of the invention.

[0102] In another aspect, the present invention provides a vial comprising a dsRNA agent of the invention, or a pharmaceutical composition of the invention.

[0103] In yet another aspect, the present invention provides a syringe comprising a dsRNA agent of the invention, or a pharmaceutical composition of the invention.

[0104] In another aspect, the present invention provides an intrathecal pump comprising a dsRNA agent of the invention, or a pharmaceutical composition of the invention.

### DETAILED DESCRIPTION OF THE INVENTION

[0105] The present disclosure provides RNAi compositions, which effect the RNA-induced silencing complex (RISC)-mediated cleavage of RNA transcripts of an ABLIM3 gene. The ABLIM3 gene may be within a cell, e.g., a cell within a subject, such as a human. The use of these iRNAs enables the targeted degradation of mRNAs of the corresponding gene (ABLIM3 gene) in mammals.

[0106] The iRNAs of the invention have been designed to target an ABLIM3 gene, e.g., an ABLIM3 gene either with or without nucleotide modifications. The iRNAs of the invention inhibit the expression of the ABLIM3 gene by at least about 30%, 35%, 40%, 45%, 50%, 55%, 60%, 65%, 70%, 75%, 80%, 85%, 90%, 95%, or 99%. Without intending to be limited by theory, it is believed that a combination or sub-combination of the foregoing properties and the specific target sites, or the specific modifications in these iRNAs confer to the iRNAs of the invention improved efficacy, stability, potency, durability, and safety.

[0107] Accordingly, the present disclosure also provides methods of using the RNAi compositions of the disclosure for inhibiting the expression of an ABLIM3 gene or for treating a subject having a disorder that would benefit from inhibiting or reducing the expression of an ABLIM3 gene, e.g., PTSD or age-related memory loss.

[0108] The RNAi agents of the disclosure include an RNA strand (the antisense strand) having a region which is about 30 nucleotides or less in length, e.g., 15-30, 15-29, 15-28, 15-27, 15-26, 15-25, 15-24, 15-23, 15-22, 15-21, 15-20, 15-19, 15-18, 15-17, 18-30, 18-29, 18-28, 18-27, 18-26, 18-25, 18-24, 18-23, 18-22, 18-21, 18-20, 19-30, 19-29, 19-28, 19-27, 19-26, 19-25, 19-24, 19-23, 19-22, 19-21, 19-20, 20-30, 20-29, 20-28, 20-27, 20-26, 20-25, 20-24, 20-23, 20-22, 20-21, 21-30, 21-29, 21-28, 21-27, 21-26, 21-25, 21-24, 21-23, or 21-22 nucleotides in length, which region is substantially complementary to at least part of an mRNA transcript of an ABLIM3 gene, e.g., an ABLIM3 exon. In certain embodiments, the RNAi agents of the disclosure include an RNA strand (the antisense strand) having a region which is about 21-23 nucleotides in length, which region is substantially complementary to at least part of an mRNA transcript of an ABLIM3 gene.

[0109] In certain embodiments, the RNAi agents of the disclosure include an RNA strand (the antisense strand) which can include longer lengths, for example up to 66 nucleotides, e.g., 36-66, 26-36, 25-36, 31-60, 22-43, 27-53 nucleotides in length with a region of at least 19 contiguous nucleotides that is substantially complementary to at least a part of an mRNA transcript of an ABLIM3 gene. These RNAi agents with the longer length antisense strands preferably include a second RNA strand (the sense strand) of 20-60 nucleotides in length wherein the sense and antisense strands form a duplex of 18-30 contiguous nucleotides.

[0110] The use of these RNAi agents enables the targeted degradation and/or inhibition of mRNAs of an ABLIM3 gene in mammals. Thus, methods and compositions including these RNAi agents are useful for treating a subject who would benefit by a reduction in the levels or activity of an ABLIM3 protein, such as a subject having PTSD or age-related memory loss.

[0111] The following detailed description discloses how to make and use compositions containing RNAi agents to inhibit the expression of an ABLIM3 gene, as well as compositions and methods for treating subjects having diseases and disorders that would benefit from inhibition or reduction of the expression of the genes.

### I. Definitions

[0112] In order that the present disclosure may be more readily understood, certain terms are first defined. In addition, it should be noted that whenever a value or range of values of a parameter are recited, it is intended that values and ranges intermediate to the recited values are also intended to be part of this disclosure.

[0113] The articles “a” and “an” are used herein to refer to one or to more than one (i.e., to at least one) of the grammatical object of the article. By way of example, “an element” means one element or more than one element, e.g., a plurality of elements.

[0114] The term “including” is used herein to mean, and is used interchangeably with, the phrase “including but not limited to”. The term “or” is used herein to mean, and is used interchangeably with, the term “and/or,” unless context clearly indicates otherwise.

[0115] The term “about” is used herein to mean within the typical ranges of tolerances in the art. For example, “about” can be understood as about 2 standard deviations from the mean. In certain embodiments, about means ±10%. In certain embodiments, about means ±5%. When about is present before a series of numbers or a range, it is understood that “about” can modify each of the numbers in the series or range.

[0116] The term “at least” prior to a number or series of numbers is understood to include the number adjacent to the term “at least”, and all subsequent numbers or integers that could logically be included, as clear from context. For example, the number of nucleotides in a nucleic acid molecule must be an integer. For example, “at least 18 nucleotides of a 21 nucleotide nucleic acid molecule” means that 18, 19, 20, or 21 nucleotides have the indicated property. When at least is present before a series of numbers or a range, it is understood that “at least” can modify each of the numbers in the series or range.

[0117] As used herein, “no more than” or “or less” is understood as the value adjacent to the phrase and logical lower values or integers, as logical from context, to zero. For example, a duplex with an overhang of “no more than 2 nucleotides” has a 2, 1, or 0 nucleotide overhang. When “no more than” is present before a series of numbers or a range, it is understood that “no more than” can modify each of the numbers in the series or range.

[0118] As used herein, methods of detection can include determination that the amount of analyte present is below the level of detection of the method.

[0119] In the event of a conflict between an indicated target site and the nucleotide sequence for a sense or antisense strand, the indicated sequence takes precedence.

[0120] In the event of a conflict between a chemical structure and a chemical name, the chemical structure takes precedence.

[0121] As used herein, the term “Actin binding LIM protein 3” used interchangeably with the term “ABLIM3,” refers to the well-known gene and polypeptide encoded by that gene, also known in the art as “actin binding LIM protein family member 3,” “KIAA0843,” and “HMFN1661”. The ABLIM3 gene is expressed and active in the brain and is expressed in other tissues, including fat tissue, heart, placenta, and liver. ABLIM3 is expressed in some cells of the central nervous system, including dentate granule cells. RNAi therapy can specifically target brain ABLIM3, thereby avoiding peripheral side effects.

[0122] ABLIM3 has recently been implicated in memory as a molecular brake in connectivity of dentate granule cells and stratum lucidum interneurons (Guo, et al., 2018, Nat Med. 24(4):438-449). Using an animal model of learning, the levels of ABLIM3 were shown to decrease upon learning. The study found that downregulation of ABLIM3 in dentate granule cells decreased remote memory generalization and increased remote memory precision, which could help alleviate memory impairments and PTSD.

[0123] Exemplary nucleotide and amino acid sequences of ABLIM3 can be found, for example, at GenBank Accession No. NM_001301015.3 (Homo sapiens ABLIM3. SEQ ID NO: 1, reverse complement, SEQ ID NO: 2); and GenBank Accession No.: NM_001164491.1 (Mus musculus ABLIM3).

[0124] The nucleotide sequence of the genomic region of human chromosome harboring the ABLIM3 gene may be found in, for example, the Genome Reference Consortium Human Build 38 (also referred to as Human Genome build 38 or GRCh38) available at GenBank. The nucleotide sequence of the genomic region of human chromosome 5 harboring the ABLIM3 gene may also be found at, for example, GenBank Accession No. NC_000005.10, corresponding to nucleotides 149,141,193-14,9260,542 of human chromosome 5. The nucleotide sequence of the human ABLIM3 gene may be found in, for example, GenBank Accession No. NG_051566.1.

[0125] Further examples of ABLIM3 sequences can be found in publically available databases, for example, GenBank, OMIM, and UniProt.

[0126] Additional information on ABLIM3 can be found, for example, at https://www.ncbi.nlm.nih.gov/gene/22885. The term ABLIM3 as used herein also refers to variations of the ABLIM3 gene including variants provided in the clinical variant database, for example, at https://www.ncbi.nlm.nih.gov/clinvar/?term=ABLIM3[gene].

[0127] The entire contents of each of the foregoing GenBank Accession numbers and the Gene database numbers are incorporated herein by reference as of the date of filing this application.

[0128] As used herein, “target sequence” refers to a contiguous portion of the nucleotide sequence of an mRNA molecule formed during the transcription of an ABLIM3 gene, including mRNA that is a product of RNA processing of a primary transcription product. In one embodiment, the target portion of the sequence will be at least long enough to serve as a substrate for RNAi-directed cleavage at or near that portion of the nucleotide sequence of an mRNA molecule formed during the transcription of an ABLIM3 gene.

[0129] The target sequence is about 15-30 nucleotides in length. For example, the target sequence can be from about 15-30 nucleotides, 15-29, 15-28, 15-27, 15-26, 15-25, 15-24, 15-23, 15-22, 15-21, 15-20, 15-19, 15-18, 15-17, 18-30, 18-29, 18-28, 18-27, 18-26, 18-25, 18-24, 18-23, 18-22, 18-21, 18-20, 19-30, 19-29, 19-28, 19-27, 19-26, 19-25, 19-24, 19-23, 19-22, 19-21, 19-20, 20-30, 20-29, 20-28, 20-27, 20-26, 20-25, 20-24, 20-23, 20-22, 20-21, 21-30, 21-29, 21-28, 21-27, 21-26, 21-25, 21-24, 21-23, or 21-22 nucleotides in length. In certain embodiments, the target sequence is 19-23 nucleotides in length, optionally 21-23 nucleotides in length. Ranges and lengths intermediate to the above recited ranges and lengths are also contemplated to be part of the disclosure.

[0130] As used herein, the term “strand comprising a sequence” refers to an oligonucleotide comprising a chain of nucleotides that is described by the sequence referred to using the standard nucleotide nomenclature. “G,” “C,” “A,” “T”, and “U” each generally stand for a nucleotide that contains guanine, cytosine, adenine, thymidine, and uracil as a base, respectively in the context of a modified or unmodified nucleotide. However, it will be understood that the term “ribonucleotide” or “nucleotide” can also refer to a modified nucleotide, as further detailed below, or a surrogate replacement moiety (see, e.g., Table 2). The skilled person is well aware that guanine, cytosine, adenine, thymidine, and uracil can be replaced by other moieties without substantially altering the base pairing properties of an oligonucleotide comprising a nucleotide bearing such replacement moiety. For example, without limitation, a nucleotide comprising inosine as its base can base pair with nucleotides containing adenine, cytosine, or uracil. Hence, nucleotides containing uracil, guanine, or adenine can be replaced in the nucleotide sequences of dsRNA featured in the disclosure by a nucleotide containing, for example, inosine. In another example, adenine and cytosine anywhere in the oligonucleotide can be replaced with guanine and uracil, respectively to form G-U Wobble base pairing with the target mRNA. Sequences containing such replacement moieties are suitable for the compositions and methods featured in the disclosure.

[0131] The terms “iRNA”, “RNAi agent,” “iRNA agent,” “RNA interference agent” as used interchangeably herein, refer to an agent that contains RNA as that term is defined herein, and which mediates the targeted cleavage of an RNA transcript via an RNA-induced silencing complex (RISC) pathway. RNA interference (RNAi) is a process that directs the sequence-specific degradation of mRNA. RNAi modulates, e.g., inhibits, the expression of ABLIM3 in a cell, e.g., a cell within a subject, such as a mammalian subject.

[0132] In one embodiment, an RNAi agent of the disclosure includes a single stranded RNAi that interacts with a target RNA sequence, e.g., an ABLIM3 target mRNA sequence, to direct the cleavage of the target RNA. Without wishing to be bound by theory it is believed that long double stranded RNA introduced into cells is broken down into double-stranded short interfering RNAs (siRNAs) comprising a sense strand and an antisense strand by a Type III endonuclease known as Dicer (Sharp et al. (2001) Genes Dev. 15:485). Dicer, a ribonuclease-III-like enzyme, processes this dsRNA into 19-23 base pair short interfering RNAs with characteristic two base 3′ overhangs (Bernstein, et al., (2001) Nature 409:363). These siRNAs are then incorporated into an RNA-induced silencing complex (RISC) where one or more helicases unwind the siRNA duplex, enabling the complementary antisense strand to guide target recognition (Nykanen, et al., (2001) Cell 107:309). Upon binding to the appropriate target mRNA, one or more endonucleases within the RISC cleave the target to induce silencing (Elbashir, et al., (2001) Genes Dev. 15:188). Thus, in one aspect the disclosure relates to a single stranded RNA (ssRNA) (the antisense strand of a siRNA duplex) generated within a cell and which promotes the formation of a RISC complex to effect silencing of the target gene, i.e., an ABLIM3 gene. Accordingly, the term “siRNA” is also used herein to refer to an RNAi as described above.

[0133] In another embodiment, the RNAi agent may be a single-stranded RNA that is introduced into a cell or organism to inhibit a target mRNA. Single-stranded RNAi agents bind to the RISC endonuclease, Argonaute 2, which then cleaves the target mRNA. The single-stranded siRNAs are generally 15-30 nucleotides and are chemically modified. The design and testing of single-stranded RNAs are described in U.S. Pat. No. 8,101,348 and in Lima et al., (2012) Cell 150:883-894, the entire contents of each of which are hereby incorporated herein by reference. Any of the antisense nucleotide sequences described herein may be used as a single-stranded siRNA as described herein or as chemically modified by the methods described in Lima et al., (2012) Cell 150:883-894.

[0134] In another embodiment, a “RNAi agent” for use in the compositions and methods of the disclosure is a double stranded RNA and is referred to herein as a “double stranded RNAi agent,” “double stranded RNA (dsRNA) molecule,” “dsRNA agent,” or “dsRNA”. The term “dsRNA” refers to a complex of ribonucleic acid molecules, having a duplex structure comprising two anti-parallel and substantially complementary nucleic acid strands, referred to as having “sense” and “antisense” orientations with respect to a target RNA, i.e., an ABLIM3 gene. In some embodiments of the disclosure, a double stranded RNA (dsRNA) triggers the degradation of a target RNA, e.g., an mRNA, through a post-transcriptional gene-silencing mechanism referred to herein as RNA interference or RNAi.

[0135] In general, a dsRNA molecule can include ribonucleotides, but as described in detail herein, each or both strands can also include one or more non-ribonucleotides, e.g., a deoxyribonucleotide, a modified nucleotide. In addition, as used in this specification, an “RNAi agent” may include ribonucleotides with chemical modifications; an RNAi agent may include substantial modifications at multiple nucleotides. As used herein, the term “modified nucleotide” refers to a nucleotide having, independently, a modified sugar moiety, a modified internucleotide linkage, or a modified nucleobase. Thus, the term modified nucleotide encompasses substitutions, additions or removal of, e.g., a functional group or atom, to internucleoside linkages, sugar moieties, or nucleobases. The modifications suitable for use in the agents of the disclosure include all types of modifications disclosed herein or known in the art. Any such modifications, as used in a siRNA type molecule, are encompassed by “RNAi agent” for the purposes of this specification and claims.

[0136] In certain embodiments of the instant disclosure, inclusion of a deoxy-nucleotide if present within an RNAi agent can be considered to constitute a modified nucleotide.

[0137] The duplex region may be of any length that permits specific degradation of a desired target RNA through a RISC pathway, and may range from about 15-36 base pairs in length, for example, about 15, 16, 17, 18, 19, 20, 21, 22, 23, 24, 25, 26, 27, 28, 29, 30, 31, 32, 33, 34, 35, or 36 base pairs in length, such as about 15-30, 15-29, 15-28, 15-27, 15-26, 15-25, 15-24, 15-23, 15-22, 15-21, 15-20, 15-19, 15-18, 15-17, 18-30, 18-29, 18-28, 18-27, 18-26, 18-25, 18-24, 18-23, 18-22, 18-21, 18-20, 19-30, 19-29, 19-28, 19-27, 19-26, 19-25, 19-24, 19-23, 19-22, 19-21, 19-20, 20-30, 20-29, 20-28, 20-27, 20-26, 20-25, 20-24, 20-23, 20-22, 20-21, 21-30, 21-29, 21-28, 21-27, 21-26, 21-25, 21-24, 21-23, or 21-22 base pairs in length. In certain embodiments, the duplex region is 19-21 base pairs in length, e.g., 21 base pairs in length. Ranges and lengths intermediate to the above recited ranges and lengths are also contemplated to be part of the disclosure.

[0138] The two strands forming the duplex structure may be different portions of one larger RNA molecule, or they may be separate RNA molecules. Where the two strands are part of one larger molecule, and they may be connected by an uninterrupted chain of nucleotides between the 3′-end of one strand and the 5′-end of the respective other strand forming the duplex structure, the connecting RNA chain is referred to as a “hairpin loop.” A hairpin loop can comprise at least one unpaired nucleotide. In some embodiments, the hairpin loop can comprise at least 4, at least 5, at least 6, at least 7, at least 8, at least 9, at least 10, at least 20, at least 23 or more unpaired nucleotides or nucleotides not directed to the target site of the dsRNA. In some embodiments, the hairpin loop can be 10 or fewer nucleotides. In some embodiments, the hairpin loop can be 8 or fewer unpaired nucleotides. In some embodiments, the hairpin loop can be 4-10 unpaired nucleotides. In some embodiments, the hairpin loop can be 4-8 nucleotides.

[0139] Where the two substantially complementary strands of a dsRNA are comprised by separate RNA molecules, those molecules need not, but can be covalently connected. In certain embodiments where the two strands are connected covalently by means other than an uninterrupted chain of nucleotides between the 3′-end of one strand and the 5′-end of the respective other strand forming the duplex structure, the connecting structure is referred to as a “linker” (though it is noted that certain other structures defined elsewhere herein can also be referred to as a “linker”). The RNA strands may have the same or a different number of nucleotides. The maximum number of base pairs is the number of nucleotides in the shortest strand of the dsRNA minus any overhangs that are present in the duplex. In addition to the duplex structure, an RNAi may comprise one or more nucleotide overhangs. In one embodiment of the RNAi agent, at least one strand comprises a 3′ overhang of at least 1 nucleotide. In another embodiment, at least one strand comprises a 3′ overhang of at least 2 nucleotides, e.g., 2, 3, 4, 5, 6, 7, 9, 10, 11, 12, 13, 14, or 15 nucleotides. In other embodiments, at least one strand of the RNAi agent comprises a 5′ overhang of at least 1 nucleotide. In certain embodiments, at least one strand comprises a 5′ overhang of at least 2 nucleotides, e.g., 2, 3, 4, 5, 6, 7, 9, 10, 11, 12, 13, 14, or 15 nucleotides. In still other embodiments, both the 3′ and the 5′ end of one strand of the RNAi agent comprise an overhang of at least 1 nucleotide.

[0140] In one embodiment, an RNAi agent of the disclosure is a dsRNA, each strand of which independently comprises 19-23 nucleotides, that interacts with a target RNA sequence, e.g., an ABLIM3 target mRNA sequence, to direct the cleavage of the target RNA.

[0141] In some embodiments, an iRNA of the invention is a dsRNA of 24-30 nucleotides that interacts with a target RNA sequence, e.g., an ABLIM3 target mRNA sequence, to direct the cleavage of the target RNA.

[0142] As used herein, the term “nucleotide overhang” refers to at least one unpaired nucleotide that protrudes from the duplex structure of an RNAi agent, e.g., a dsRNA. For example, when a 3′-end of one strand of a dsRNA extends beyond the 5′-end of the other strand, or vice versa, there is a nucleotide overhang. A dsRNA can comprise an overhang of at least one nucleotide; alternatively, the overhang can comprise at least two nucleotides, at least three nucleotides, at least four nucleotides, at least five nucleotides or more. A nucleotide overhang can comprise or consist of a nucleotide/nucleoside analog, including a deoxynucleotide/nucleoside. The overhang(s) can be on the sense strand, the antisense strand or any combination thereof. Furthermore, the nucleotide(s) of an overhang can be present on the 5′-end, 3′-end or both ends of either an antisense or sense strand of a dsRNA.

[0143] In one embodiment, the antisense strand of a dsRNA has a 1-10 nucleotide, e.g., a 1, 2, 3, 4, 5, 6, 7, 8, 9, or 10 nucleotide, overhang at the 3′-end or the 5′-end. In one embodiment, the sense strand of a dsRNA has a 1-10 nucleotide, e.g., a 1, 2, 3, 4, 5, 6, 7, 8, 9, or 10 nucleotide, overhang at the 3′-end or the 5′-end. In another embodiment, one or more of the nucleotides in the overhang is replaced with a nucleoside thiophosphate.

[0144] In certain embodiments, the antisense strand of a dsRNA has a 1-10 nucleotide, e.g., 0-3, 1-3, 2-4, 2-5, 4-10, 5-10, e.g., a 1, 2, 3, 4, 5, 6, 7, 8, 9, or 10 nucleotide, overhang at the 3′-end or the 5′-end. In one embodiment, the sense strand of a dsRNA has a 1-10 nucleotide, e.g., a 1, 2, 3, 4, 5, 6, 7, 8, 9, or 10 nucleotide, overhang at the 3′-end or the 5′-end. In another embodiment, one or more of the nucleotides in the overhang is replaced with a nucleoside thiophosphate.

[0145] In certain embodiments, the antisense strand of a dsRNA has a 1-15 nucleotide, e.g., 0-3, 1-3, 2-4, 2-5, 4-10, 5-10, 6-12 or e.g., a 1, 2, 3, 4, 5, 6, 7, 8, 9, 10, 11, 12, 13, 14, or 15 nucleotide, overhang at the 3′-end. In another embodiment, one or more of the nucleotides in the overhang is replaced with a nucleoside thiophosphate.

[0146] In certain embodiments, the overhang on the sense strand or the antisense strand, can include extended lengths longer than 10 or 15 nucleotides, e.g., 1-30 nucleotides, 2-30 nucleotides, 10-30 nucleotides, or 10-15 nucleotides in length. In certain embodiments, an extended overhang is on the sense strand of the duplex. In certain embodiments, an extended overhang is present on the 3′ end of the sense strand of the duplex. In certain embodiments, an extended overhang is present on the 5′ end of the sense strand of the duplex. In certain embodiments, an extended overhang is on the antisense strand of the duplex. In certain embodiments, an extended overhang is present on the 3′ end of the antisense strand of the duplex. In certain embodiments, an extended overhang is present on the 5′ end of the antisense strand of the duplex. In certain embodiments, one or more of the nucleotides in the overhang is replaced with a nucleoside thiophosphate. In certain embodiments, the overhang includes a self-complementary portion such that the overhang is capable of forming a hairpin structure that is stable under physiological conditions.

[0147] The terms “blunt” or “blunt ended” as used herein in reference to a dsRNA mean that there are no unpaired nucleotides or nucleotide analogs at a given terminal end of a dsRNA, i.e., no nucleotide overhang. One or both ends of a dsRNA can be blunt. Where both ends of a dsRNA are blunt, the dsRNA is said to be blunt ended. To be clear, a “blunt ended” dsRNA is a dsRNA that is blunt at both ends, i.e., no nucleotide overhang at either end of the molecule. Most often such a molecule will be double stranded over its entire length.

[0148] The term “antisense strand” or “guide strand” refers to the strand of an RNAi agent, e.g., a dsRNA, which includes a region that is substantially complementary to a target sequence, e.g., an ABLIM3 mRNA.

[0149] As used herein, the term “region of complementarity” refers to the region on the antisense strand that is substantially complementary to a sequence, for example a target sequence, e.g., an ABLIM3 nucleotide sequence, as defined herein. Where the region of complementarity is not fully complementary to the target sequence, the mismatches can be in the internal or terminal regions of the molecule. Generally, the most tolerated mismatches are in the terminal regions, e.g., within 5, 4, 3, or 2 nucleotides of the 5′- or 3′-terminus of the RNAi agent. In some embodiments, a double stranded RNA agent of the invention includes a nucleotide mismatch in the antisense strand. In some embodiments, the antisense strand of the double stranded RNA agent of the invention includes no more than 4 mismatches with the target mRNA, e.g., the antisense strand includes 4, 3, 2, 1, or 0 mismatches with the target mRNA. In some embodiments, the antisense strand double stranded RNA agent of the invention includes no more than 4 mismatches with the sense strand, e.g., the antisense strand includes 4, 3, 2, 1, or 0 mismatches with the sense strand. In some embodiments, a double stranded RNA agent of the invention includes a nucleotide mismatch in the sense strand. In some embodiments, the sense strand of the double stranded RNA agent of the invention includes no more than 4 mismatches with the antisense strand, e.g., the sense strand includes 4, 3, 2, 1, or 0 mismatches with the antisense strand. In some embodiments, the nucleotide mismatch is, for example, within 5, 4, 3 nucleotides from the 3′-end of the iRNA. In another embodiment, the nucleotide mismatch is, for example, in the 3′-terminal nucleotide of the iRNA agent. In some embodiments, the mismatch(s) is not in the seed region.

[0150] Thus, an RNAi agent as described herein can contain one or more mismatches to the target sequence. In one embodiment, an RNAi agent as described herein contains no more than 3 mismatches (i.e., 3, 2, 1, or 0 mismatches). In one embodiment, an RNAi agent as described herein contains no more than 2 mismatches. In one embodiment, an RNAi agent as described herein contains no more than 1 mismatch. In one embodiment, an RNAi agent as described herein contains 0 mismatches. In certain embodiments, when the antisense strand of the RNAi agent contains mismatches to the target sequence, then the mismatch can optionally be restricted to be within the last 5 nucleotides from either the 5′- or 3′-end of the region of complementarity. For example, in such embodiments, for a 23 nucleotide RNAi agent, the strand which is complementary to a region of an ABLIM3 gene, generally does not contain any mismatch within the central 13 nucleotides. The methods described herein or methods known in the art can be used to determine whether an RNAi agent containing a mismatch to a target sequence is effective in inhibiting the expression of an ABLIM3 gene. For example, Jackson et al. (Nat. Biotechnol. 2003; 21: 635-637) described an expression profile study where the expression of a small set of genes with sequence identity to the MAPK14 siRNA only at 12-18 nt of the sense strand, was down-regulated with similar kinetics to MAPK14. Similarly, Lin et al., (Nucleic Acids Res. 2005; 33(14): 4527-4535) using qPCR and reporter assays, showed that a 7 nt complementation between a siRNA and a target is sufficient to cause mRNA degradation of the target. Consideration of the efficacy of RNAi agents with mismatches in inhibiting expression of an ABLIM3 gene is important, especially if the particular region of complementarity in an ABLIM3 gene is known to have polymorphic sequence variation within the population.

[0151] An RNA target may have regions, or spans of the target RNA's nucleotide sequence, which are relatively more susceptible or amenable than other regions of the RNA target to mediating cleavage of the RNA target via RNA interference induced by the binding of an RNAi agent to that region. The increased susceptibility to RNA interference within such “hotspot regions” (or simply “hotspots”) means that iRNA agents targeting the region will likely have higher efficacy in inducing iRNA interference than iRNA agents which target other regions of the target RNA. For example, without being bound by theory, the accessibility of a target region of a target RNA may influence the efficacy of iRNA agents which target that region, with some hotspot regions having increased accessibility. Secondary structures, for instance, that form in the RNA target (e.g., within or proximate to hotspot regions) may affect the ability of the iRNA agent to bind the target region and induce RNA interference.

[0152] According to certain aspects of the invention, an iRNA agent may be designed to target a hotspot region of any of the target RNAs described herein, including any identified portions of a target RNA (e.g., a particular exon). As used herein, a hotspot region may refer to an approximately 19-200, 19-150, 19-100, 19-75, 19-50, 21-200, 21-150, 21-100, 21-75, 21-50, 50-200, 50-150, 50-100, 50-75, 75-200, 75-150, 75-100, 100-200, or 100-150 nucleotide region of a target RNA sequence for which targeting using RNAi agents provides an observably higher probability of efficacious silencing relative to targeting other regions of the same target RNA. According to certain aspects of the invention, a hotspot region may comprise a limited region of the target RNA, and in some cases, a substantially limited region of the target, including for example, less than half of the length of the target RNA, such as about 5%, 10%, 15%, 20%, 25%, or 30% of the length of the target RNA. Conversely, the other regions against which a hotspot is compared may cumulatively comprise at least a majority of the length of the target RNA. For example, the other regions may cumulatively comprise at least about 60%, or at least about 70%, or at least about 80%, or at least about 90%, or at least about 95% of the length of the target RNA.

[0153] Compared regions of the target RNA may be empirically evaluated for identification of hotspots using efficacy data obtained from in vitro or in vivo screening assays. For example, RNAi agents targeting various regions that span a target RNA may be compared for frequency of efficacious iRNA agents (e.g., the amount by which target gene expression is inhibited, such as measured by mRNA expression or protein expression) that bind each region. In general, a hotspot can be recognized by observing clustering of multiple efficacious RNAi agents that bind to a limited region of the RNA target. A hotspot may be sufficiently characterized as such by observing efficacy of iRNA agents which cumulatively span at least about 60% of the target region identified as a hotspot, such as about 70%, about 80%, about 90%, or about 95% or more of the length of the region, including both ends of the region (i.e. at least about 60%, 70%, 80%, 90%, or 95% or more of the nucleotides within the region, including the nucleotides at each end of the region, were targeted by an iRNA agent). According to some aspects of the invention, an iRNA agent which demonstrates at least about 50%, 55%, 60%, 65%, 70%, 75%, 80%, 85%, 90%, or 95% inhibition over the region (e.g., no more than about 50%, 45%, 40%, 35%, 30%, 25%, 20%, 15%, 10%, or 5% mRNA remaining) may be identified as efficacious.

[0154] Amenibility to targeting of RNA regions may also be assessed using quantitative comparison of inhibition measurements across different regions of a defined size (e.g., 25, 30, 40, 50, 60, 70, 80, 90, or 100, 110, 120, 130, 140, 150, 160, 170, 180, 190, or 200 nts). For example, an average level of inhibition may be determined for each region and the averages of each region may be compared. The average level of inhibition within a hotspot region may be substantially higher than the average of averages for all evaluated regions. According to some aspects, the average level of inhibition in a hotspot region may be at least about 10%, 20%, 30%, 40%, or 50% higher than the average of averages. According to some aspects, the average level of inhibition in a hotspot region may be at least about 1.0, 1.1, 1.2, 1.3, 1.4, 1.5, 1.6, 1.7, 1.8, 1.9, or 2.0 standard deviations above the average of averages. The average level of inhibition may be higher by a statistically significant (e.g., p<0.05) amount. According to some aspects, each inhibition measurement within a hotspot region may be above a threshold amount (e.g., at or below a threshold amount of mRNA remaining). According to some aspects, each inhibition measurement within the region may be substantially higher than an average of all inhibition measurements across all the measured regions. For example, each inhibition measurement in a hotspot region may be at least about 10%, 20%, 30%, 40%, or 50% higher than the average of all inhibition measurements. According to some aspects, each inhibition measurement may be at least about 1.0, 1.1, 1.2, 1.3, 1.4, 1.5, 1.6, 1.7, 1.8, 1.9, or 2.0 standard deviations above the average of all inhibition measurements. Each inhibition measurement may be higher by a statistically significant (e.g., p<0.05) amount than the average of all inhibition measurements. A standard for evaluating a hotspot may comprise various combinations of the above standards where compatible (e.g., an average level of inhibition of at least about a first amount and having no inhibition measurements below a threshold level of a second amount, lesser than the first amount).

[0155] It is therefore expressly contemplated that any iRNA agent, including the specific exemplary iRNA agents described herein, which targets a hotspot region of a target RNA, may be preferably selected for inducing RNA interference of the target mRNA as targeting such a hotspot region is likely to exhibit a robust inhibitory response relative to targeting a region which is not a hotspot region. RNAi agents targeting target sequences that substantially overlap (e.g., by at least about 70%, 75%, 80%, 85%, 90%, 95% of the target sequence length) or, preferably, that reside fully within the hotspot region may be considered to target the hotspot region. Hotspot regions of the RNA target(s) of the instant invention may include any region for which the data disclosed herein demonstrates higher frequency of targeting by efficacious RNAi agents, including by any of the standards described elsewhere herein, whether or not the range(s) of such hotspot region(s) are explicitly specified.

[0156] In various embodiments, a dsRNA agent of the present invention targets a hotspot region of an mRNA encoding ABLIM3. In one embodiment, the hotspot region comprises nucleotides 3042-3081, 3420-3457, 4223-4261, 726-763, 1080-1137, 1342-1379, 1910-1955, 2167-2204, 480-520, 1080-1122, 1622-1665, 1744-1787, 2323-2363, 540-578, 1175-1212, 274-313, 349-401, or 2518-2555 of SEQ ID NO: 1. The dsRNA agent may be selected from the group consisting of AD-1809702, AD-1809719, AD-1810038, AD-1810053, AD-1810676, AD-1810692, AD-1807904, AD-1807919, AD-1808238, AD-1808258, AD-1808273, AD-1808418, AD-1808433, AD-1808842, AD-1808865, AD-1809051, AD-1809066, AD-1807707, AD-1807725, AD-1808628, AD-1808649, AD-1808727, AD-1808748, AD-1809187, AD-1809205, AD-1807764, AD-1807780, AD-1808312, AD-1808327, AD-1807561, AD-1807578, AD-1807616, AD-1807631, AD-1807646, AD-1809354, and AD-1809369.

[0157] As used herein, “substantially all of the nucleotides are modified” are largely but not wholly modified and can include not more than 5, 4, 3, 2, or 1 unmodified nucleotides.

[0158] The term “sense strand” or “passenger strand” as used herein, refers to the strand of an RNAi agent that includes a region that is substantially complementary to a region of the antisense strand as that term is defined herein.

[0159] As used herein, the term “cleavage region” refers to a region that is located immediately adjacent to the cleavage site. The cleavage site is the site on the target at which cleavage occurs. In some embodiments, the cleavage region comprises three bases on either end of, and immediately adjacent to, the cleavage site. In some embodiments, the cleavage region comprises two bases on either end of, and immediately adjacent to, the cleavage site. In some embodiments, the cleavage site specifically occurs at the site bound by nucleotides 10 and 11 of the antisense strand, and the cleavage region comprises nucleotides 11, 12 and 13.

[0160] As used herein, and unless otherwise indicated, the term “complementary,” when used to describe a first nucleotide sequence in relation to a second nucleotide sequence, refers to the ability of an oligonucleotide or polynucleotide comprising the first nucleotide sequence to hybridize and form a duplex structure under certain conditions with an oligonucleotide or polynucleotide comprising the second nucleotide sequence, as will be understood by the skilled person. Such conditions can be, for example, “stringent conditions”, including but not limited to, 400 mM NaCl, 40 mM PIPES pH 6.4, 1 mM EDTA, 50° C. or 70° C. for 12-16 hours followed by washing (see, e.g., “Molecular Cloning: A Laboratory Manual, Sambrook, et al. (1989) Cold Spring Harbor Laboratory Press). As used herein, “stringent conditions” or “stringent hybridization conditions” refers to conditions under which an antisense compound will hybridize to its target sequence, but to a minimal number of other sequences. Stringent conditions are sequence-dependent and will be different in different circumstances, and “stringent conditions” under which antisense compounds hybridize to a target sequence are determined by the nature and composition of the antisense compounds and the assays in which they are being investigated. Other conditions, such as physiologically relevant conditions as can be encountered inside an organism, can apply. The skilled person will be able to determine the set of conditions most appropriate for a test of complementarity of two sequences in accordance with the ultimate application of the hybridized nucleotides.

[0161] Complementary sequences within an RNAi agent, e.g., within a dsRNA as described herein, include base-pairing of the oligonucleotide or polynucleotide comprising a first nucleotide sequence to an oligonucleotide or polynucleotide comprising a second nucleotide sequence over the entire length of one or both nucleotide sequences. Such sequences can be referred to as “fully complementary” with respect to each other herein. However, where a first sequence is referred to as “substantially complementary” with respect to a second sequence herein, the two sequences can be fully complementary, or they can form one or more, but generally not more than 5, 4, 3 or 2 mismatched base pairs upon hybridization for a duplex up to 30 base pairs. In some embodiments, the “substantially complementary” sequences disclosed herein comprise a contiguous nucleotide sequence which is at least about 80% complementary over its entire length to the equivalent region of the target ABLIM3 sequence, such as about 85%, about 90%, about 91%, about 92%, about 93%, about 94%, about 95%, about 96%, about 97%, about 98%, or about 99% complementary. However, where two oligonucleotides are designed to form, upon hybridization, one or more single stranded overhangs, such overhangs shall not be regarded as mismatches with regard to the determination of complementarity. For example, a dsRNA comprising one oligonucleotide 21 nucleotides in length and another oligonucleotide 23 nucleotides in length, wherein the longer oligonucleotide comprises a sequence of 21 nucleotides that is fully complementary to the shorter oligonucleotide, can yet be referred to as “fully complementary” for the purposes described herein.

[0162] “Complementary” sequences, as used herein, can also include, or be formed entirely from, non-Watson-Crick base pairs or base pairs formed from non-natural and modified nucleotides, in so far as the above requirements with respect to their ability to hybridize are fulfilled. Such non-Watson-Crick base pairs include, but are not limited to, G:U Wobble or Hoogsteen base pairing.

[0163] The terms “complementary,” “fully complementary” and “substantially complementary” herein can be used with respect to the base matching between two oligonucleotides or polynucleotides, such as the sense strand and the antisense strand of a dsRNA, or between the antisense strand of an RNAi agent and a target sequence, as will be understood from the context of their use.

[0164] As used herein, a polynucleotide that is “substantially complementary to at least part of” a messenger RNA (mRNA) refers to a polynucleotide that is substantially complementary to a contiguous portion of the mRNA of interest (e.g., an mRNA encoding ABLIM3). For example, a polynucleotide is complementary to at least a part of an ABLIM3 mRNA if the sequence is substantially complementary to a non-interrupted portion of an mRNA encoding ABLIM3.

[0165] Accordingly, in some embodiments, the antisense polynucleotides disclosed herein are fully complementary to the target ABLIM3 sequence. In other embodiments, the antisense polynucleotides disclosed herein are substantially complementary to the target ABLIM3 sequence and comprise a contiguous nucleotide sequence which is at least 80% complementary over its entire length to the equivalent region of the nucleotide sequence of SEQ ID NO:1, or a fragment of any one of SEQ ID NOs: 1, 3, 5 and 7, such as about 85%, about 90%, about 91%, about 92%, about 93%, about 94%, about 95%, about 96%, about 97%, about 98%, or about 99% complementary.

[0166] In some embodiments, the antisense polynucleotides disclosed herein are substantially complementary to a fragment of a target ABLIM3 sequence and comprise a contiguous nucleotide sequence which is at least 80% complementary over its entire length to a fragment of SEQ ID NO: 1 selected from the group of nucleotides 80-102, 132-154, 230-252, 274-296, 291-313, 324-346, 349-371, 364-386, 379-401, 412-434, 480-502, 498-520, 540-562, 556-578, 580-602, 620-642, 672-694, 690-712, 711-733, 726-748, 741-763, 777-799, 885-907, 940-962, 981-1003, 999-1021, 1080-1102, 1100-1122, 1115-1137, 1175-1197, 1190-1212, 1240-1262, 1267-1289, 1311-1333, 1342-1364, 1357-1379, 1372-1394, 1406-1428, 1435-1457, 1548-1570, 1592-1614, 1622-1644, 1643-1665, 1672-1694, 1713-1735, 1744-1766, 1765-1787, 1810-1832, 1857-1879, 1882-1904, 1910-1932, 1933-1955, 1969-1991, 2037-2059, 2094-2116, 2125-2147, 2167-2189, 2182-2204, 2216-2238, 2243-2265, 2271-2293, 2323-2345, 2341-2363, 2383-2405, 2420-2442, 2457-2479, 2481-2503, 2518-2540, 2533-2555, 2559-2581, 2583-2605, 2665-2687, 2701-2723, 2727-2749, 2762-2784, 2786-2808, 2828-2850, 2859-2881, 2883-2905, 2935-2957, 2956-2978, 2972-2994, 3009-3031, 3042-3064, 3059-3081, 3077-3099, 3108-3130, 3144-3166, 3201-3223, 3218-3240, 3277-3299, 3301-3323, 3319-3341, 3336-3358, 3386-3408, 3405-3427, 3420-3442, 3435-3457, 3450-3472, 3530-3552, 3546-3568, 3577-3599, 3592-3614, 3624-3646, 3642-3664, 3680-3702, 3704-3726, 3719-3741, 3744-3766, 3761-3783, 3794-3816, 3812-3834, 3847-3869, 3864-3886, 3895-3917, 3917-3939, 3984-4006, 4016-4038, 4035-4057, 4056-4078, 4082-4104, 4097-4119, 4129-4151, 4157-4179, 4223-4245, 4239-4261, 4274-4296, 4289-4311, 4304-4326, 4334-4356, 4352-4374, 4367-4389, 4385-4407, 4402-4424, and 4419-4441 of SEQ ID NO: 1, such as about 85%, about 90%, about 91%, about 92%, about 93%, about 94%, about 95%, about 96%, about 97%, about 98%, or about 99% complementary. Ranges intermediate to the above recited ranges are also contemplated to be part of the disclosure.

[0167] In other embodiments, the antisense polynucleotides disclosed herein are substantially complementary to the target ABLIM3 sequence and comprise a contiguous nucleotide sequence which is at least about 80% complementary over its entire length to any one of the sense strand nucleotide sequences in Tables 3 or 4, or a fragment of any one of the sense strand nucleotide sequences in Tables 3 or 4, such as about 85%, about 90%, about 91%, about 92%, about 93%, about 94%, about 95%, about 96%, about 97%, about 98%, about 99%, or 100% complementary.

[0168] In one embodiment, an RNAi agent of the disclosure includes a sense strand that is substantially complementary to an antisense polynucleotide which, in turn, is the same as a target ABLIM3 sequence, and wherein the sense strand polynucleotide comprises a contiguous nucleotide sequence which is at least about 80% complementary over its entire length to the equivalent region of the nucleotide sequence of SEQ ID NO:1, or a fragment of any one of SEQ ID NO:1, such as about 85%, about 90%, about 91%, about 92%, about 93%, about 94%, about 95%, about 96%, about 97%, about 98%, about 99%, or 100% complementary.

[0169] In some embodiments, an iRNA of the invention includes a sense strand that is substantially complementary to an antisense polynucleotide which, in turn, is complementary to a target ABLIM3 sequence, and wherein the sense strand polynucleotide comprises a contiguous nucleotide sequence which is at least about 80% complementary over its entire length to any one of the antisense strand nucleotide sequences in Tables 3 or 4, or a fragment of any one of the antisense strand nucleotide sequences in Tables 3 or 4, such as about 85%, about 90%, about 91%, about 92%, about 93%, about 94%, about 95%, about 96%, about 97%, about 98%, about 99%, or 100% complementary.

[0170] In certain embodiments, the sense and antisense strands are selected from any one of duplexes AD-1807455, AD-1807481, AD-1807539, AD-1807561, AD-1807578, AD-1807591, AD-1807616, AD-1807631, AD-1807646, AD-1807659, AD-1807707, AD-1807725, AD-1807764, AD-1807780, AD-1807804, AD-1807844, AD-1807870, AD-1807888, AD-1807889, AD-1807904, AD-1807919, AD-1807955, AD-1808063, AD-1808098, AD-1808139, AD-1808157, AD-1808238, AD-1808258, AD-1808273, AD-1808312, AD-1808327, AD-1808356, AD-1808383, AD-1808407, AD-1808418, AD-1808433, AD-1808448, AD-1808482, AD-1808511, AD-1808561, AD-1808598, AD-1808628, AD-1808649, AD-1808678, AD-1808698, AD-1808727, AD-1808748, AD-1808773, AD-1808789, AD-1808814, AD-1808842, AD-1808865, AD-1808901, AD-1808941, AD-1808978, AD-1809009, AD-1809051, AD-1809066, AD-1809080, AD-1809107, AD-1809135, AD-1809187, AD-1809205, AD-1809246, AD-1809283, AD-1809293, AD-1809317, AD-1809354, AD-1809369, AD-1809395, AD-1809414, AD-1809456, AD-1809472, AD-1809498, AD-1809511, AD-1809535, AD-1809550, AD-1809561, AD-1809585, AD-1809596, AD-1809617, AD-1809633, AD-1809670, AD-1809702, AD-1809719, AD-1809737, AD-1809757, AD-1809773, AD-1809822, AD-1809839, AD-1809895, AD-1809919, AD-1809937, AD-1809954, AD-1810004, AD-1810023, AD-1810038, AD-1810053, AD-1810068, AD-1810127, AD-1810143, AD-1810174, AD-1810189, AD-1810221, AD-1810239, AD-1810255, AD-1810277, AD-1810292, AD-1810296, AD-1810313, AD-1810345, AD-1810363, AD-1810398, AD-1810415, AD-1810446, AD-1810468, AD-1810494, AD-1810526, AD-1810545, AD-1810566, AD-1810591, AD-1810606, AD-1810638, AD-1810666, AD-1810676, AD-1810692, AD-1810727, AD-1810742, AD-1810757, AD-1810767, AD-1810785, AD-1810800, AD-1810818, AD-1810822, and AD-1810839

[0171] In one embodiment, at least partial suppression of the expression of an ABLIM3 gene, is assessed by a reduction of the amount of ABLIM3 mRNA, e.g., sense mRNA, antisense mRNA, total ABLIM3 mRNA, which can be isolated from or detected in a first cell or group of cells in which an ABLIM3 gene is transcribed and which has or have been treated such that the expression of an ABLIM3 gene is inhibited, as compared to a second cell or group of cells substantially identical to the first cell or group of cells but which has or have not been so treated (control cells). The degree of inhibition may be expressed in terms of:

$$\frac{( mRNA in control cells ) - ( mRNA in treated cells )}{( mRNA in control cells )} \cdot 100 \%$$

[0172] The phrase “contacting a cell with an RNAi agent,” such as a dsRNA, as used herein, includes contacting a cell by any possible means. Contacting a cell with an RNAi agent includes contacting a cell in vitro with the RNAi agent or contacting a cell in vivo with the RNAi agent. The contacting may be done directly or indirectly. Thus, for example, the RNAi agent may be put into physical contact with the cell by the individual performing the method, or alternatively, the RNAi agent may be put into a situation that will permit or cause it to subsequently come into contact with the cell.

[0173] Contacting a cell in vitro may be done, for example, by incubating the cell with the RNAi agent. Contacting a cell in vivo may be done, for example, by injecting the RNAi agent into or near the tissue where the cell is located, or by injecting the RNAi agent into another area, e.g., the central nervous system (CNS), optionally via intrathecal, intravitreal or other injection, or to the bloodstream (i.e., intravenous) or the subcutaneous space, such that the agent will subsequently reach the tissue where the cell to be contacted is located. For example, the RNAi agent may contain or be coupled to a ligand, e.g., a lipophilic moiety or moieties as described below and further detailed, e.g., in PCT/US2019/031170, which is incorporated herein by reference, that directs or otherwise stabilizes the RNAi agent at a site of interest, e.g., the CNS. Combinations of in vitro and in vivo methods of contacting are also possible. For example, a cell may also be contacted in vitro with an RNAi agent and subsequently transplanted into a subject.

[0174] In one embodiment, contacting a cell with an RNAi agent includes “introducing” or “delivering the RNAi agent into the cell” by facilitating or effecting uptake or absorption into the cell. Absorption or uptake of an RNAi agent can occur through unaided diffusive or active cellular processes, or by auxiliary agents or devices. Introducing an RNAi agent into a cell may be in vitro or in vivo. For example, for in vivo introduction, an RNAi agent can be injected into a tissue site or administered systemically. In vitro introduction into a cell includes methods known in the art such as electroporation and lipofection. Further approaches are described herein below or are known in the art.

[0175] The term “lipophile” or “lipophilic moiety” broadly refers to any compound or chemical moiety having an affinity for lipids. One way to characterize the lipophilicity of the lipophilic moiety is by the octanol-water partition coefficient, log K_{ow}, where K_{ow} is the ratio of a chemical's concentration in the octanol-phase to its concentration in the aqueous phase of a two-phase system at equilibrium. The octanol-water partition coefficient is a laboratory-measured property of a substance. However, it may also be predicted by using coefficients attributed to the structural components of a chemical which are calculated using first-principle or empirical methods (see, for example, Tetko, et. al., J. Chem. Inf. Comput. Sci. 41:1407-21 (2001), which is incorporated herein by reference in its entirety). It provides a thermodynamic measure of the tendency of the substance to prefer a non-aqueous or oily milieu rather than water (i.e. its hydrophilic/lipophilic balance). In principle, a chemical substance is lipophilic in character when its log K_{ow} exceeds 0. Typically, the lipophilic moiety possesses a log K_{ow} exceeding 1, exceeding 1.5, exceeding 2, exceeding 3, exceeding 4, exceeding 5, or exceeding 10. For instance, the log K_{ow} of 6-amino hexanol, for instance, is predicted to be approximately 0.7. Using the same method, the log K_{ow} of cholesteryl N-(hexan-6-ol) carbamate is predicted to be 10.7.

[0176] The lipophilicity of a molecule can change with respect to the functional group it carries. For instance, adding a hydroxyl group or amine group to the end of a lipophilic moiety can increase or decrease the partition coefficient (e.g., log K_{ow}) value of the lipophilic moiety.

[0177] Alternatively, the hydrophobicity of the double-stranded RNAi agent, conjugated to one or more lipophilic moieties, can be measured by its protein binding characteristics. For instance, in certain embodiments, the unbound fraction in the plasma protein binding assay of the double-stranded RNAi agent could be determined to positively correlate to the relative hydrophobicity of the double-stranded RNAi agent, which could then positively correlate to the silencing activity of the double-stranded RNAi agent.

[0178] In one embodiment, the plasma protein binding assay determined is an electrophoretic mobility shift assay (EMSA) using human serum albumin protein. An exemplary protocol of this binding assay is illustrated in detail in, e.g., PCT/US2019/031170. The hydrophobicity of the double-stranded RNAi agent, measured by fraction of unbound siRNA in the binding assay, exceeds 0.15, exceeds 0.2, exceeds 0.25, exceeds 0.3, exceeds 0.35, exceeds 0.4, exceeds 0.45, or exceeds 0.5 for an enhanced in vivo delivery of siRNA.

[0179] Accordingly, conjugating the lipophilic moieties to the internal position(s) of the double-stranded RNAi agent provides optimal hydrophobicity for the enhanced in vivo delivery of siRNA.

[0180] The term “lipid nanoparticle” or “LNP” is a vesicle comprising a lipid layer encapsulating a pharmaceutically active molecule, such as a nucleic acid molecule, e.g., a RNAi agent or a plasmid from which an RNAi agent is transcribed. LNPs are described in, for example, U.S. Pat. Nos. 6,858,225, 6,815,432, 8,158,601, and 8,058,069, the entire contents of which are hereby incorporated herein by reference.

[0181] As used herein, a “subject” is an animal, such as a mammal, including a primate (such as a human, a non-human primate, e.g., a monkey, and a chimpanzee), or a non-primate (such as a rat, or a mouse). In one embodiment, the subject is a human, such as a human being treated or assessed for a disease, disorder, or condition that would benefit from reduction in ABLIM3 expression; a human at risk for a disease, disorder, or condition that would benefit from reduction in ABLIM3 expression; a human having a disease, disorder, or condition that would benefit from reduction in ABLIM3 expression; or human being treated for a disease, disorder, or condition that would benefit from reduction in ABLIM3 expression as described herein. In some embodiments, the subject is a female human. In other embodiments, the subject is a male human. In one embodiment, the subject is an adult subject. In one embodiment, the subject is a pediatric subject. In another embodiment, the subject is a juvenile subject, i.e., a subject below 20 years of age.

[0182] As used herein, the terms “treating” or “treatment” refer to a beneficial or desired result including, but not limited to, alleviation or amelioration of one or more signs or symptoms associated with ABLIM3 gene expression or ABLIM3 protein production, e.g., ABLIM3-associated disease, such as PTSD or age-related memory loss. “Treatment” can also mean prolonging survival as compared to expected survival in the absence of treatment.

[0183] The term “lower” in the context of the level of ABLIM3 in a subject or a disease marker or symptom refers to a statistically significant decrease in such level. The decrease can be, for example, at least 10%, 15%, 20%, 25%, 30%, %, 40%, 45%, 50%, 55%, 60%, 65%, 70%, 75%, 80%, 85%, 90%, 95%, or more. In certain embodiments, a decrease is at least about 20%. In certain embodiments, the decrease is at least about 30% in a disease marker, e.g., a decrease of 30%, 35%, 40%, 45%, 50%, 55%, 60%, 65%, 70%, 75%, 80%, 85%, 90%, 95%, 99%, or more. In certain embodiments, the decrease is at least about 50% in a disease marker. “Lower” in the context of the level of ABLIM3 in a subject is preferably down to a level accepted as within the range of normal for an individual without such disorder. In certain embodiments, “lower” is the decrease in the difference between the level of a marker or symptom for a subject suffering from a disease and a level accepted within the range of normal for an individual, e.g., the level of memory loss as compared to the accepted normal level.

[0184] As used herein, “prevention” or “preventing,” when used in reference to a disease, disorder, or condition thereof, that would benefit from a reduction in expression of an ABLIM3 gene or production of an ABLIM3 protein, refers to a reduction in the likelihood that a subject will develop a symptom or a sign associated with such a disease, disorder, or condition, e.g., a symptom or a sign of an ABLIM3-associated disease, such as PTSD or age-related memory loss. The failure to develop a disease, disorder, or condition, or the reduction in the development of a symptom associated with such a disease, disorder, or condition (e.g., by at least about 10% on a clinically accepted scale for that disease or disorder), or the exhibition of delayed symptoms delayed (e.g., by days, weeks, months or years) is considered effective prevention.

[0185] As used herein, the term “ABLIM3-associated disease,” “ABLIM3-associated condition,” or “ABLIM3-associated disorder” includes any disease, condition, or disorder that would benefit from reduction in the expression and/or activity of ABLIM3. Exemplary ABLIM3-associated conditions include PTSD or age-related memory loss.

[0186] “Therapeutically effective amount.” as used herein, is intended to include the amount of an RNAi agent that, when administered to a subject having an ABLIM3-associated disease, is sufficient to effect treatment of the disease (e.g., by diminishing, ameliorating, or maintaining the existing disease or one or more symptoms of disease). The “therapeutically effective amount” may vary depending on the RNAi agent, how the agent is administered, the disease and its severity and the history, age, weight, family history, genetic makeup, the types of preceding or concomitant treatments, if any, and other individual characteristics of the subject to be treated.

[0187] “Prophylactically effective amount,” as used herein, is intended to include the amount of an RNAi agent that, when administered to a subject having an ABLIM3-associated disorder, is sufficient to prevent or ameliorate the disease or one or more symptoms of the disease. Ameliorating the disease includes slowing the course of the disease or reducing the severity of later-developing disease. The “prophylactically effective amount” may vary depending on the RNAi agent, how the agent is administered, the degree of risk of disease, and the history, age, weight, family history, genetic makeup, the types of preceding or concomitant treatments, if any, and other individual characteristics of the patient to be treated.

[0188] A “therapeutically-effective amount” or “prophylactically effective amount” also includes an amount of an RNAi agent that produces some desired local or systemic effect at a reasonable benefit/risk ratio applicable to any treatment. An RNAi agent employed in the methods of the present disclosure may be administered in a sufficient amount to produce a reasonable benefit/risk ratio applicable to such treatment.

[0189] The phrase “pharmaceutically acceptable” is employed herein to refer to those compounds, materials, compositions, or dosage forms which are, within the scope of sound medical judgment, suitable for use in contact with the tissues of human subjects and animal subjects without excessive toxicity, irritation, allergic response, or other problem or complication, commensurate with a reasonable benefit/risk ratio.

[0190] The phrase “pharmaceutically-acceptable carrier” as used herein means a pharmaceutically-acceptable material, composition or vehicle, such as a liquid or solid filler, diluent, excipient, manufacturing aid (e.g., lubricant, talc magnesium, calcium or zinc stearate, or steric acid), or solvent encapsulating material, involved in carrying or transporting the subject compound from one organ, or portion of the body, to another organ, or portion of the body. Each carrier must be “acceptable” in the sense of being compatible with the other ingredients of the formulation and not injurious to the subject being treated. Some examples of materials which can serve as pharmaceutically-acceptable carriers include: (1) sugars, such as lactose, glucose and sucrose; (2) starches, such as corn starch and potato starch; (3) cellulose, and its derivatives, such as sodium carboxymethyl cellulose, ethyl cellulose and cellulose acetate; (4) powdered tragacanth; (5) malt; (6) gelatin; (7) lubricating agents, such as magnesium state, sodium lauryl sulfate and talc; (8) excipients, such as cocoa butter and suppository waxes; (9) oils, such as peanut oil, cottonseed oil, safflower oil, sesame oil, olive oil, corn oil and soybean oil; (10) glycols, such as propylene glycol; (11) polyols, such as glycerin, sorbitol, mannitol and polyethylene glycol; (12) esters, such as ethyl oleate and ethyl laurate; (13) agar; (14) buffering agents, such as magnesium hydroxide and aluminum hydroxide; (15) alginic acid; (16) pyrogen-free water; (17) isotonic saline; (18) Ringer's solution; (19) ethyl alcohol; (20) pH buffered solutions; (21) polyesters, polycarbonates or polyanhydrides; (22) bulking agents, such as polypeptides and amino acids (23) serum component, such as serum albumin, HDL and LDL; and (22) other non-toxic compatible substances employed in pharmaceutical formulations.

[0191] The term “sample,” as used herein, includes a collection of similar fluids, cells, or tissues isolated from a subject, as well as fluids, cells, or tissues present within a subject. Examples of biological fluids include blood, serum and serosal fluids, plasma, cerebrospinal fluid, ocular fluids, lymph, urine, saliva, and the like. Tissue samples may include samples from tissues, organs or localized regions. For example, samples may be derived from particular organs, parts of organs, or fluids or cells within those organs. In certain embodiments, samples may be derived from the brain (e.g., whole brain or certain segments of brain, e.g., hippocampus, striatum, or certain types of cells in the brain, such as, e.g., dentate granule cells, neurons and glial cells (astrocytes, oligodendrocytes, microglial cells)). In some embodiments, a “sample derived from a subject” refers to blood drawn from the subject or plasma or serum derived therefrom. In further embodiments, a “sample derived from a subject” refers to brain tissue (or subcomponents thereof) or retinal tissue (or subcomponents thereof) derived from the subject.

[0192] The term “substituted” refers to the replacement of one or more hydrogen radicals in a given structure with the radical of a specified substituent including, but not limited to: alkyl, alkenyl, alkynyl, aryl, heterocyclyl, halo, thiol, alkylthio, arylthio, alkylthioalkyl, arylthioalkyl, alkylsulfonyl, alkylsulfonylalkyl, arylsulfonylalkyl, alkoxy, aryloxy, aralkoxy, aminocarbonyl, alkylaminocarbonyl, arylaminocarbonyl, alkoxycarbonyl, aryloxycarbonyl, haloalkyl, amino, trifluoromethyl, cyano, nitro, alkylamino, arylamino, alkylaminoalkyl, arylaminoalkyl, aminoalkylamino, hydroxy, alkoxyalkyl, carboxyalkyl, alkoxycarbonylalkyl, aminocarbonylalkyl, acyl, aralkoxycarbonyl, carboxylic acid, sulfonic acid, sulfonyl, phosphonic acid, aryl, heteroaryl, heterocyclic, and aliphatic. It is understood that the substituent can be further substituted.

[0193] The term “alkyl” refers to saturated and unsaturated non-aromatic hydrocarbon chains that may be a straight chain or branched chain, containing the indicated number of carbon atoms (these include without limitation propyl, allyl, or propargyl), which may be optionally inserted with N, O, or S. For example, “(C1-C6) alkyl” means a radical having from 1 to 6 carbon atoms in a linear or branched arrangement. “(C1-C6) alkyl” includes, for example, methyl, ethyl, propyl, iso-propyl, n-butyl, tert-butyl, pentyl and hexyl. In certain embodiments, a lipophilic moiety of the instant disclosure can include a C6-C18 alkyl hydrocarbon chain.

[0194] The term “alkylene” refers to an optionally substituted saturated aliphatic branched or straight chain divalent hydrocarbon radical having the specified number of carbon atoms. For example, “(C1-C6) alkylene” means a divalent saturated aliphatic radical having from 1-6 carbon atoms in a linear arrangement, e.g., [(CH₂)ₙ], where n is an integer from 1 to 6. “(C1-C6) alkylene” includes methylene, ethylene, propylene, butylene, pentylene and hexylene. Alternatively, “(C1-C6) alkylene” means a divalent saturated radical having from 1-6 carbon atoms in a branched arrangement, for example: [(CH₂CH₂CH₂CH₂CH(CH₃)], [(CH₂CH₂CH₂CH₂C(CH₃)₂], [(CH₂C(CH₃)₂CH(CH₃))], and the like. The term “alkylenedioxo” refers to a divalent species of the structure —O—R—O—, in which R represents an alkylene.

[0195] The term “mercapto” refers to an —SH radical. The term “thioalkoxy” refers to an —S-alkyl radical.

[0196] The term “halo” refers to any radical of fluorine, chlorine, bromine or iodine. “Halogen” and “halo” are used interchangeably herein.

[0197] As used herein, the term “cycloalkyl” means a saturated or unsaturated nonaromatic hydrocarbon ring group having from 3 to 14 carbon atoms, unless otherwise specified. For example, “(C3-C10) cycloalkyl” means a hydrocarbon radical of a (3-10)-membered saturated aliphatic cyclic hydrocarbon ring. Examples of cycloalkyl groups include, but are not limited to, cyclopropyl, methyl-cyclopropyl, 2,2-dimethyl-cyclobutyl, 2-ethyl-cyclopentyl, cyclohexyl, etc. Cycloalkyls may include multiple spiro- or fused rings. Cycloalkyl groups are optionally mono-, di-, tri-, tetra-, or penta-substituted on any position as permitted by normal valency.

[0198] As used herein, the term “alkenyl” refers to a non-aromatic hydrocarbon radical, straight or branched, containing at least one carbon-carbon double bond, and having from 2 to 10 carbon atoms unless otherwise specified. Up to five carbon-carbon double bonds may be present in such groups. For example, “C2-C6” alkenyl is defined as an alkenyl radical having from 2 to 6 carbon atoms. Examples of alkenyl groups include, but are not limited to, ethenyl, propenyl, butenyl, and cyclohexenyl. The straight, branched, or cyclic portion of the alkenyl group may contain double bonds and is optionally mono-, di-, tri-, tetra-, or penta-substituted on any position as permitted by normal valency. The term “cycloalkenyl” means a monocyclic hydrocarbon group having the specified number of carbon atoms and at least one carbon-carbon double bond.

[0199] As used herein, the term “alkynyl” refers to a hydrocarbon radical, straight or branched, containing from 2 to 10 carbon atoms, unless otherwise specified, and containing at least one carbon-carbon triple bond. Up to 5 carbon-carbon triple bonds may be present. Thus, “C2-C6 alkynyl” means an alkynyl radical having from 2 to 6 carbon atoms. Examples of alkynyl groups include, but are not limited to, ethynyl, 2-propynyl, and 2-butynyl. The straight or branched portion of the alkynyl group may contain triple bonds as permitted by normal valency, and may be optionally mono-, di-, tri-, tetra-, or penta-substituted on any position as permitted by normal valency.

[0200] As used herein, “alkoxyl” or “alkoxy” refers to an alkyl group as defined above with the indicated number of carbon atoms attached through an oxygen bridge. For example, “(C1-C3)alkoxy” includes methoxy, ethoxy and propoxy. For example, “(C1-C6)alkoxy”, is intended to include C1, C2, C3, C4, C5, and C6 alkoxy groups. For example, “(C1-C8)alkoxy”, is intended to include C1, C2, C3, C4, C5, C6, C7, and C8 alkoxy groups. Examples of alkoxy include, but are not limited to, methoxy, ethoxy, n-propoxy, i-propoxy, n-butoxy, s-butoxy, t-butoxy, n-pentoxy, s-pentoxy, n-heptoxy, and n-octoxy. “Alkylthio” means an alkyl radical attached through a sulfur linking atom. The terms “alkylamino” or “aminoalkyl”, means an alkyl radical attached through an NH linkage. “Dialkylamino” means two alkyl radical attached through a nitrogen linking atom. The amino groups may be unsubstituted, monosubstituted, or di-substituted. In some embodiments, the two alkyl radicals are the same (e.g., N,N-dimethylamino). In some embodiments, the two alkyl radicals are different (e.g., N-ethyl-N-methylamino).

[0201] As used herein, “aryl” or “aromatic” means any stable monocyclic or polycyclic carbon ring of up to 7 atoms in each ring, wherein at least one ring is aromatic. Examples of aryl groups include, but are not limited to, phenyl, naphthyl, anthracenyl, tetrahydronaphthyl, indanyl, and biphenyl. In cases where the aryl substituent is bicyclic and one ring is non-aromatic, it is understood that attachment is via the aromatic ring. Aryl groups are optionally mono-, di-, tri-, tetra-, or penta-substituted on any position as permitted by normal valency. The term “arylalkyl” or the term “aralkyl” refers to alkyl substituted with an aryl. The term “arylalkoxy” refers to an alkoxy substituted with aryl.

[0202] “Hetero” refers to the replacement of at least one carbon atom in a ring system with at least one heteroatom selected from N, S and O. “Hetero” also refers to the replacement of at least one carbon atom in an acyclic system. A hetero ring system or a hetero acyclic system may have, for example, 1, 2 or 3 carbon atoms replaced by a heteroatom.

[0203] As used herein, the term “heteroaryl” represents a stable monocyclic or polycyclic ring of up to 7 atoms in each ring, wherein at least one ring is aromatic and contains from 1 to 4 heteroatoms selected from the group consisting of O, N and S. Examples of heteroaryl groups include, but are not limited to, acridinyl, carbazolyl, cinnolinyl, quinoxalinyl, pyrrazolyl, indolyl, benzotriazolyl, furanyl, thienyl, benzothienyl, benzofuranyl, benzimidazolonyl, benzoxazolonyl, quinolinyl, isoquinolinyl, dihydroisoindolonyl, imidazopyridinyl, isoindolonyl, indazolyl, oxazolyl, oxadiazolyl, isoxazolyl, indolyl, pyrazinyl, pyridazinyl, pyridinyl, pyrimidinyl, pyrrolyl, tetrahydroquinoline. “Heteroaryl” is also understood to include the N-oxide derivative of any nitrogen-containing heteroaryl. In cases where the heteroaryl substituent is bicyclic and one ring is non-aromatic or contains no heteroatoms, it is understood that attachment is via the aromatic ring or via the heteroatom containing ring. Heteroaryl groups are optionally mono-, di-, tri-, tetra-, or penta-substituted on any position as permitted by normal valency.

[0204] As used herein, the term “heterocycle,” “heterocyclic,” or “heterocyclyl” means a 3- to 14-membered aromatic or nonaromatic heterocycle containing from 1 to 4 heteroatoms selected from the group consisting of O, N and S, including polycyclic groups. As used herein, the term “heterocyclic” is also considered to be synonymous with the terms “heterocycle” and “heterocyclyl” and is understood as also having the same definitions set forth herein. “Heterocyclyl” includes the above mentioned heteroaryls, as well as dihydro and tetrahydro analogs thereof. Examples of heterocyclyl groups include, but are not limited to, azetidinyl, benzoimidazolyl, benzofuranyl, benzofurazanyl, benzopyrazolyl, benzotriazolyl, benzothiophenyl, benzoxazolyl, carbazolyl, carbolinyl, cinnolinyl, furanyl, imidazolyl, indolinyl, indolyl, indolazinyl, indazolyl, isobenzofuranyl, isoindolyl, isoquinolyl, isothiazolyl, isoxazolyl, naphthpyridinyl, oxadiazolyl, oxooxazolidinyl, oxazolyl, oxazoline, oxopiperazinyl, oxopyrrolidinyl, oxomorpholinyl, isoxazoline, oxetanyl, pyranyl, pyrazinyl, pyrazolyl, pyridazinyl, pyridopyridinyl, pyridazinyl, pyridyl, pyridinonyl, pyrimidyl, pyrimidinonyl, pyrrolyl, quinazolinyl, quinolyl, quinoxalinyl, tetrahydropyranyl, tetrahydrofuranyl, tetrahydrothiopyranyl, tetrahydroisoquinolinyl, tetrazolyl, tetrazolopyridyl, thiadiazolyl, thiazolyl, thienyl, triazolyl, 1,4-dioxanyl, hexahydroazepinyl, piperazinyl, piperidinyl, pyridin-2-onyl, pyrrolidinyl, morpholinyl, thiomorpholinyl, dihydrobenzoimidazolyl, dihydrobenzofuranyl, dihydrobenzothiophenyl, dihydrobenzoxazolyl, dihydrofuranyl, dihydroimidazolyl, dihydroindolyl, dihydroisooxazolyl, dihydroisothiazolyl, dihydrooxadiazolyl, dihydrooxazolyl, dihydropyrazinyl, dihydropyrazolyl, dihydropyridinyl, dihydropyrimidinyl, dihydropyrrolyl, dihydroquinolinyl, dihydrotetrazolyl, dihydrothiadiazolyl, dihydrothiazolyl, dihydrothienyl, dihydrotriazolyl, dihydroazetidinyl, dioxidothiomorpholinyl, methylenedioxybenzoyl, tetrahydrofuranyl, and tetrahydrothienyl, and N-oxides thereof. Attachment of a heterocyclyl substituent can occur via a carbon atom or via a heteroatom. Heterocyclyl groups are optionally mono-, di-, tri-, tetra-, or penta-substituted on any position as permitted by normal valency.

[0205] “Heterocycloalkyl” refers to a cycloalkyl residue in which one to four of the carbons is replaced by a heteroatom such as oxygen, nitrogen or sulfur. Examples of heterocycles whose radicals are heterocyclyl groups include tetrahydropyran, morpholine, pyrrolidine, piperidine, thiazolidine, oxazole, oxazoline, isoxazole, dioxane, tetrahydrofuran and the like.

[0206] The term “heteroaryl” refers to an aromatic 5-8 membered monocyclic, 8-12 membered bicyclic, or 11-14 membered tricyclic ring system having 1-3 heteroatoms if monocyclic, 1-6 heteroatoms if bicyclic, or 1-9 heteroatoms if tricyclic, said heteroatoms selected from O, N, or S (e.g., carbon atoms and 1-3, 1-6, or 1-9 heteroatoms of N, O, or S if monocyclic, bicyclic, or tricyclic, respectively), wherein 0, 1, 2, 3, or 4 atoms of each ring may be substituted by a substituent. Examples of heteroaryl groups include pyridyl, furyl or furanyl, imidazolyl, benzimidazolyl, pyrimidinyl, thiophenyl or thienyl, quinolinyl, indolyl, thiazolyl, and the like. The term “heteroarylalkyl” or the term “heteroaralkyl” refers to an alkyl substituted with a heteroaryl. The term “heteroarylalkoxy” refers to an alkoxy substituted with heteroaryl.

[0207] The term “cycloalkyl” as employed herein includes saturated and partially unsaturated cyclic hydrocarbon groups having 3 to 12 carbons, for example, 3 to 8 carbons, and, for example, 3 to 6 carbons, wherein the cycloalkyl group additionally may be optionally substituted. Cycloalkyl groups include, without limitation, cyclopropyl, cyclobutyl, cyclopentyl, cyclopentenyl, cyclohexyl, cyclohexenyl, cycloheptyl, and cyclooctyl.

[0208] The term “acyl” refers to an alkylcarbonyl, cycloalkylcarbonyl, arylcarbonyl, heterocyclylcarbonyl, or heteroarylcarbonyl substituent, any of which may be further substituted by substituents.

[0209] As used herein, “keto” refers to any alkyl, alkenyl, alkynyl, cycloalkyl, cycloalkenyl, heterocyclyl, heteroaryl, or aryl group as defined herein attached through a carbonyl bridge.

[0210] Examples of keto groups include, but are not limited to, alkanoyl (e.g., acetyl, propionyl, butanoyl, pentanoyl, hexanoyl), alkenoyl (e.g., acryloyl) alkynoyl (e.g., ethynoyl, propynoyl, butynoyl, pentynoyl, hexynoyl), aryloyl (e.g., benzoyl), heteroaryloyl (e.g., pyrroloyl, imidazoloyl, quinolinoyl, pyridinoyl).

[0211] As used herein, “alkoxycarbonyl” refers to any alkoxy group as defined above attached through a carbonyl bridge (i.e., —C(O)O-alkyl). Examples of alkoxycarbonyl groups include, but are not limited to, methoxycarbonyl, ethoxycarbonyl, iso-propoxycarbonyl, n-propoxycarbonyl, t-butoxycarbonyl, benzyloxycarbonyl or n-pentoxycarbonyl.

[0212] As used herein, “aryloxycarbonyl” refers to any aryl group as defined herein attached through an oxycarbonyl bridge (i.e., —C(O)O-aryl). Examples of aryloxycarbonyl groups include, but are not limited to, phenoxycarbonyl and naphthyloxycarbonyl.

[0213] As used herein, “heteroaryloxycarbonyl” refers to any heteroaryl group as defined herein attached through an oxycarbonyl bridge (i.e., —C(O)O-heteroaryl). Examples of heteroaryloxycarbonyl groups include, but are not limited to, 2-pyridyloxycarbonyl, 2-oxazolyloxycarbonyl, 4-thiazolyloxycarbonyl, or pyrimidinyloxycarbonyl.

[0214] The term “oxo” refers to an oxygen atom, which forms a carbonyl when attached to carbon, an N-oxide when attached to nitrogen, and a sulfoxide or sulfone when attached to sulfur.

[0215] The person of ordinary skill in the art would readily understand and appreciate that the compounds and compositions disclosed herein may have certain atoms (e.g., N, O, or S atoms) in a protonated or deprotonated state, depending upon the environment in which the compound or composition is placed. Accordingly, as used herein, the structures disclosed herein envisage that certain functional groups, such as, for example, OH, SH, or NH, may be protonated or deprotonated. The disclosure herein is intended to cover the disclosed compounds and compositions regardless of their state of protonation based on the pH of the environment, as would be readily understood by the person of ordinary skill in the art.

### II. RNAi Agents of the Disclosure

[0216] Described herein are RNAi agents that inhibit the expression of an ABLIM3 gene. In one embodiment, the RNAi agent includes double stranded ribonucleic acid (dsRNA) molecules for inhibiting the expression of an ABLIM3 gene in a cell, such as a cell within a subject, e.g., a mammal, such as a human having an ABLIM3-associated disease, e.g., PTSD or age-related memory loss. The dsRNA includes an antisense strand having a region of complementarity which is complementary to at least a part of an mRNA formed in the expression of an ABLIM3 gene. The region of complementarity is about 15-30 nucleotides or less in length. Upon contact with a cell expressing the ABLIM3 gene, the RNAi agent inhibits the expression of the ABLIM3 gene (e.g., a human gene, a primate gene, a non-primate gene) by at least 30% as compared to a similar cell not contacted with the RNAi agent or an RNAi agent not complementary to the ABLIM3 gene. Expression of the gene may be assayed by, for example, a PCR or branched DNA (bDNA)-based method, or by a protein-based method, such as by immunofluorescence analysis, using, for example, western blotting or flowcytometric techniques. In one embodiment, the level of knockdown is assayed in monkey Cos-7 cells using an assay method provided in Example 2 below. In another embodiment, the level of knockdown is assayed in human BE(2)-C cells. In some embodiments, the level of knockdown is assayed in DU145 cells.

[0217] A dsRNA includes two RNA strands that are complementary and hybridize to form a duplex structure under conditions in which the dsRNA will be used. One strand of a dsRNA (the antisense strand) includes a region of complementarity that is substantially complementary, or fully complementary, to a target sequence. The target sequence can be derived from the sequence of an mRNA formed during the expression of an ABLIM3 gene. The other strand (the sense strand) includes a region that is complementary to the antisense strand, such that the two strands hybridize and form a duplex structure when combined under suitable conditions. As described elsewhere herein and as known in the art, the complementary sequences of a dsRNA can also be contained as self-complementary regions of a single nucleic acid molecule, as opposed to being on separate oligonucleotides.

[0218] Generally, the duplex structure is 15 to 30 base pairs in length, e.g., 15-29, 15-28, 15-27, 15-26, 15-25, 15-24, 15-23, 15-22, 15-21, 15-20, 15-19, 15-18, 15-17, 18-30, 18-29, 18-28, 18-27, 18-26, 18-25, 18-24, 18-23, 18-22, 18-21, 18-20, 19-30, 19-29, 19-28, 19-27, 19-26, 19-25, 19-24, 19-23, 19-22, 19-21, 19-20, 20-30, 20-29, 20-28, 20-27, 20-26, 20-25, 20-24, 20-23, 20-22, 20-21, 21-30, 21-29, 21-28, 21-27, 21-26, 21-25, 21-24, 21-23, or 21-22 base pairs in length. In certain embodiments, the duplex structure is 18 to 25 base pairs in length, e.g., 18-25, 18-24, 18-23, 18-22, 18-21, 18-20, 19-25, 19-24, 19-23, 19-22, 19-21, 19-20, 20-25, 20-24, 20-23, 20-22, 20-21, 21-25, 21-24, 21-23, 21-22, 22-25, 22-24, 22-23, 23-25, 23-24 or 24-25 base pairs in length, for example, 19-21 base pairs in length. Ranges and lengths intermediate to the above recited ranges and lengths are also contemplated to be part of the disclosure.

[0219] Similarly, the region of complementarity to the target sequence is 15 to 30 nucleotides in length, e.g., 15-29, 15-28, 15-27, 15-26, 15-25, 15-24, 15-23, 15-22, 15-21, 15-20, 15-19, 15-18, 15-17, 18-30, 18-29, 18-28, 18-27, 18-26, 18-25, 18-24, 18-23, 18-22, 18-21, 18-20, 19-30, 19-29, 19-28, 19-27, 19-26, 19-25, 19-24, 19-23, 19-22, 19-21, 19-20, 20-30, 20-29, 20-28, 20-27, 20-26, 20-25, 20-24,20-23, 20-22, 20-21, 21-30, 21-29, 21-28, 21-27, 21-26, 21-25, 21-24, 21-23, or 21-22 nucleotides in length, for example 19-23 nucleotides in length or 21-23 nucleotides in length. Ranges and lengths intermediate to the above recited ranges and lengths are also contemplated to be part of the disclosure.

[0220] In some embodiments, the duplex structure is 19 to 30 base pairs in length. Similarly, the region of complementarity to the target sequence is 19 to 30 nucleotides in length.

[0221] In some embodiments, the dsRNA is 15 to 23 nucleotides in length, 19 to 23 nucleotides in length, or 25 to 30 nucleotides in length. In general, the dsRNA is long enough to serve as a substrate for the Dicer enzyme. For example, it is well known in the art that dsRNAs longer than about 21-23 nucleotides can serve as substrates for Dicer. As the ordinarily skilled person will also recognize, the region of an RNA targeted for cleavage will most often be part of a larger RNA molecule, often an mRNA molecule. Where relevant, a “part” of an mRNA target is a contiguous sequence of an mRNA target of sufficient length to allow it to be a substrate for RNAi-directed cleavage (i.e., cleavage through a RISC pathway).

[0222] One of skill in the art will also recognize that the duplex region is a primary functional portion of a dsRNA, e.g., a duplex region of about 15 to 36 base pairs, e.g., 15-36, 15-35, 15-34, 15-33, 15-32, 15-31, 15-30, 15-29, 15-28, 15-27, 15-26, 15-25, 15-24, 15-23, 15-22, 15-21, 15-20, 15-19, 15-18, 15-17, 18-30, 18-29, 18-28, 18-27, 18-26, 18-25, 18-24, 18-23, 18-22, 18-21, 18-20, 19-30, 19-29, 19-28, 19-27, 19-26, 19-25, 19-24, 19-23, 19-22, 19-21, 19-20, 20-30, 20-29, 20-28, 20-27, 20-26, 20-25, 20-24,20-23, 20-22, 20-21, 21-30, 21-29, 21-28, 21-27, 21-26, 21-25, 21-24, 21-23, or 21-22 base pairs, for example, 19-21 base pairs. Thus, in one embodiment, to the extent that it becomes processed to a functional duplex, of e.g., 15-30 base pairs, that targets a desired RNA for cleavage, an RNA molecule or complex of RNA molecules having a duplex region greater than 30 base pairs is a dsRNA. Thus, an ordinarily skilled artisan will recognize that in one embodiment, a miRNA is a dsRNA. In another embodiment, a dsRNA is not a naturally occurring miRNA. In another embodiment, an RNAi agent useful to target ABLIM3 expression is not generated in the target cell by cleavage of a larger dsRNA.

[0223] A dsRNA as described herein can further include one or more single-stranded nucleotide overhangs e.g., 1, 2, 3, or 4 nucleotides. A nucleotide overhang can comprise or consist of a nucleotide/nucleoside analog, including a deoxynucleotide/nucleoside. The overhang(s) can be on the sense strand, the antisense strand or any combination thereof. Furthermore, the nucleotide(s) of an overhang can be present on the 5′-end, 3′-end or both ends of either an antisense or sense strand of a dsRNA.

[0224] A dsRNA can be synthesized by standard methods known in the art. Double stranded RNAi compounds of the invention may be prepared using a two-step procedure. First, the individual strands of the double stranded RNA molecule are prepared separately. Then, the component strands are annealed. The individual strands of the dsRNA compound can be prepared using solution-phase or solid-phase organic synthesis or both. Organic synthesis offers the advantage that the oligonucleotide strands comprising unnatural or modified nucleotides can be easily prepared. Similarly, single-stranded oligonucleotides of the invention can be prepared using solution-phase or solid-phase organic synthesis or both.

[0225] In one aspect, a dsRNA of the disclosure includes at least two nucleotide sequences, a sense sequence and an antisense sequence. The sense strand sequence for ABLIM3 may be selected from the group of sequences provided in Tables 3 or 4, and the corresponding nucleotide sequence of the antisense strand of the sense strand may be selected from the group of sequences of Tables 3 or 4. In this aspect, one of the two sequences is complementary to the other of the two sequences, with one of the sequences being substantially complementary to a sequence of an mRNA generated in the expression of an ABLIM3 gene. As such, in this aspect, a dsRNA will include two oligonucleotides, where one oligonucleotide is described as the sense strand (passenger strand) in Tables 3 or 4, and the second oligonucleotide is described as the corresponding antisense strand (guide strand) of the sense strand in Tables 3 or 4.

[0226] In one embodiment, the substantially complementary sequences of the dsRNA are contained on separate oligonucleotides. In another embodiment, the substantially complementary sequences of the dsRNA are contained on a single oligonucleotide.

[0227] It will be understood that, although the sequences in Tables 3 or 4 are described as modified or conjugated sequences, the RNA of the RNAi agent of the disclosure e.g., a dsRNA of the disclosure, may comprise any one of the sequences set forth in Tables 3 or 4 that is un-modified, un-conjugated, or modified or conjugated differently than described therein. For example, although the sense strands of the agents of the invention may be conjugated to a GalNAc ligand, these agents may be conjugated to a moiety that directs delivery to the CNS, e.g., a C16 ligand, as described herein. A lipophilic ligand can be included in any of the positions provided in the instant application.

[0228] The skilled person is well aware that dsRNAs having a duplex structure of about 20 to 23 base pairs, e.g., 21, base pairs have been hailed as particularly effective in inducing RNA interference (Elbashir et al., (2001) EMBO J., 20:6877-6888). However, others have found that shorter or longer RNA duplex structures can also be effective (Chu and Rana (2007) RNA 14:1714-1719; Kim et al. (2005) Nat Biotech 23:222-226). In the embodiments described above, by virtue of the nature of the oligonucleotide sequences provided herein, dsRNAs described herein can include at least one strand of a length of minimally 21 nucleotides. It can be reasonably expected that shorter duplexes minus only a few nucleotides on one or both ends can be similarly effective as compared to the dsRNAs described above. Hence, dsRNAs having a sequence of at least 15, 16, 17, 18, 19, 20, or more contiguous nucleotides derived from one of the sequences provided herein, and differing in their ability to inhibit the expression of an ABLIM3 gene by not more than 10, 15, 20, 25, 30, 35, 40, 45 or 50% inhibition from a dsRNA comprising the full sequence using the in vitro assay with, e.g., BE(2)-C cells or DU145 cells and a 10 nM concentration of the RNA agent and the PCR assay as provided in the examples herein, are contemplated to be within the scope of the present disclosure. In some embodiments, inhibition from a dsRNA comprising the full sequence is measured using the in vitro assay with primary mouse hepatocytes.

[0229] In addition, the RNA agents described herein identify a site(s) in an ABLIM3 mRNA transcript that is susceptible to RISC-mediated cleavage. As such, the present disclosure further features RNAi agents that target within this site(s). As used herein, an RNAi agent is said to “target within” a particular site of an mRNA transcript if the RNAi agent promotes cleavage of the mRNA transcript anywhere within that particular site. Such an RNAi agent will generally include at least about 15 contiguous nucleotides, preferably at least 19 nucleotides, from one of the sequences provided herein coupled to additional nucleotide sequences taken from the region contiguous to the selected sequence in an ABLIM3 gene.

### III. Modified RNAi Agents of the Disclosure

[0230] In one embodiment, the RNA of the RNAi agent of the disclosure e.g., a dsRNA, is un-modified, and does not comprise modified nucleotides, e.g., chemical modifications or conjugations known in the art and described herein. In one embodiment, the RNA of an RNAi agent of the disclosure, e.g., a dsRNA, is chemically modified to enhance stability or other beneficial characteristics. In certain embodiments of the disclosure, substantially all of the nucleotides of an RNAi agent of the disclosure are modified. In other embodiments of the disclosure, all of the nucleotides of an RNAi agent of the disclosure are modified. RNAi agents of the disclosure in which “substantially all of the nucleotides are modified” are largely but not wholly modified and can include not more than 5, 4, 3, 2, or unmodified nucleotides. In still other embodiments of the disclosure, RNAi agents of the disclosure can include not more than 5, 4, 3, 2 or 1 modified nucleotides.

[0231] The nucleic acids featured in the disclosure can be synthesized or modified by methods well established in the art, such as those described in “Current protocols in nucleic acid chemistry,” Beaucage, S. L. et al. (Edrs.), John Wiley & Sons, Inc., New York, NY, USA, which is hereby incorporated herein by reference. Modifications include, for example, end modifications, e.g., 5′-end modifications (phosphorylation, conjugation, inverted linkages) or 3′-end modifications (conjugation, DNA nucleotides, inverted linkages, etc.); base modifications, e.g., replacement with stabilizing bases, destabilizing bases, or bases that base pair with an expanded repertoire of partners, removal of bases (abasic nucleotides), or conjugated bases; sugar modifications (e.g., at the 2′-position or 4′-position) or replacement of the sugar; or backbone modifications, including modification or replacement of the phosphodiester linkages. Specific examples of RNAi agents useful in the embodiments described herein include, but are not limited to, RNAs containing modified backbones or no natural internucleoside linkages. RNAs having modified backbones include, among others, those that do not have a phosphorus atom in the backbone. For the purposes of this specification, and as sometimes referenced in the art, modified RNAs that do not have a phosphorus atom in their internucleoside backbone can also be considered to be oligonucleosides. In some embodiments, a modified RNAi agent will have a phosphorus atom in its internucleoside backbone.

[0232] Modified RNA backbones include, for example, phosphorothioates, chiral phosphorothioates, phosphorodithioates, phosphotriesters, aminoalkylphosphotriesters, methyl and other alkyl phosphonates including 3′-alkylene phosphonates and chiral phosphonates, phosphinates, phosphoramidates including 3′-amino phosphoramidate and aminoalkylphosphoramidates, thionophosphoramidates, thionoalkylphosphonates, thionoalkylphosphotriesters, and boranophosphates having normal 3′-5′ linkages, 2′-5′-linked analogs of these, and those having inverted polarity wherein the adjacent pairs of nucleoside units are linked 3′-5′ to 5′-3′ or 2′-5′ to 5′-2′. Various salts, mixed salts and free acid forms are also included. In some embodiments of the invention, the dsRNA agents of the invention are in a free acid form. In other embodiments of the invention, the dsRNA agents of the invention are in a salt form. In one embodiment, the dsRNA agents of the invention are in a sodium salt form. In certain embodiments, when the dsRNA agents of the invention are in the sodium salt form, sodium ions are present in the agent as counterions for substantially all of the phosphodiester and/or phosphorothioate groups present in the agent. Agents in which substantially all of the phosphodiester and/or phosphorothioate linkages have a sodium counterion include not more than 5, 4, 3, 2, or 1 phosphodiester and/or phosphorothioate linkages without a sodium counterion. In some embodiments, when the dsRNA agents of the invention are in the sodium salt form, sodium ions are present in the agent as counterions for all of the phosphodiester and/or phosphorothioate groups present in the agent.

[0233] Representative U.S. patents that teach the preparation of the above phosphorus-containing linkages include, but are not limited to, U.S. Pat. Nos. 3,687,808; 4,469,863; 4,476,301; 5,023,243; 5,177,195; 5,188,897; 5,264,423; 5,276,019; 5,278,302; 5,286,717; 5,321,131; 5,399,676; 5,405,939; 5,453,496; 5,455,233; 5,466,677; 5,476,925; 5,519,126; 5,536,821; 5,541,316; 5,550,111; 5,563,253; 5,571,799; 5,587,361; 5,625,050; 6,028,188; 6,124,445; 6,160,109; 6,169,170; 6,172,209; 6,239,265; 6,277,603; 6,326,199; 6,346,614; 6,444,423; 6,531,590; 6,534,639; 6,608,035; 6,683,167; 6,858,715; 6,867,294; 6,878,805; 7,015,315; 7,041,816; 7,273,933; 7,321,029; and RE39,464, the entire contents of each of which are hereby incorporated herein by reference.

[0234] Modified RNA backbones that do not include a phosphorus atom therein have backbones that are formed by short chain alkyl or cycloalkyl internucleoside linkages, mixed heteroatoms and alkyl or cycloalkyl internucleoside linkages, or one or more short chain heteroatomic or heterocyclic internucleoside linkages. These include those having morpholino linkages (formed in part from the sugar portion of a nucleoside); siloxane backbones; sulfide, sulfoxide and sulfone backbones; formacetyl and thioformacetyl backbones; methylene formacetyl and thioformacetyl backbones; alkene containing backbones; sulfamate backbones; methyleneimino and methylenehydrazino backbones; sulfonate and sulfonamide backbones; amide backbones; and others having mixed N, O, S and CH₂ component parts.

[0235] Representative U.S. patents that teach the preparation of the above oligonucleosides include, but are not limited to, U.S. Pat. Nos. 5,034,506; 5,166,315; 5,185,444; 5,214,134; 5,216,141; 5,235,033; 5,64,562; 5,264,564; 5,405,938; 5,434,257; 5,466,677; 5,470,967; 5,489,677; 5,541,307; 5,561,225; 5,596,086; 5,602,240; 5,608,046; 5,610,289; 5,618,704; 5,623,070; 5,663,312; 5,633,360; 5,677,437; and, 5,677,439, the entire contents of each of which are hereby incorporated herein by reference.

[0236] In other embodiments, suitable RNA mimetics are contemplated for use in RNAi agents, in which both the sugar and the internucleoside linkage, i.e., the backbone, of the nucleotide units are replaced with alternate groups. The nucleobase units are maintained for hybridization with an appropriate nucleic acid target compound. One such oligomeric compound, a RNA mimetic that has been shown to have excellent hybridization properties, is referred to as a peptide nucleic acid (PNA). In PNA compounds, the sugar backbone of an RNA is replaced with an amide containing backbone, in particular an aminoethylglycine backbone. The nucleobases are retained and are bound directly or indirectly to aza nitrogen atoms of the amide portion of the backbone. Representative U.S. patents that teach the preparation of PNA compounds include, but are not limited to, U.S. Pat. Nos. 5,539,082; 5,714,331; and 5,719,262, the entire contents of each of which are hereby incorporated herein by reference. Additional PNA compounds suitable for use in the RNAi agents of the disclosure are described in, for example, in Nielsen et al., Science, 1991, 254, 1497-1500.

[0237] Some embodiments featured in the disclosure include RNAs with phosphorothioate backbones and oligonucleosides with heteroatom backbones, and in particular —CH₂—NH—CH₂—, —CH₂—N(CH₃)—O—CH₂— [known as a methylene (methylimino) or MMI backbone], —CH₂—O—N(CH₃)—CH₂—, —CH₂—N(CH₃)—N(CH₃)—CH₂— and —N(CH₃)—CH₂—CH₂— of the above-referenced U.S. Pat. No. 5,489,677, and the amide backbones of the above-referenced U.S. Pat. No. 5,602,240. In some embodiments, the RNAs featured herein have morpholino backbone structures of the above-referenced U.S. Pat. No. 5,034,506. The native phosphodiester backbone can be represented as —O—P(O)(OH)—OCH₂—.

[0238] Modified RNAs can also contain one or more substituted sugar moieties. The RNAi agents, e.g., dsRNAs, featured herein can include one of the following at the 2′-position: OH; F; O—, S—, or N-alkyl; O—, S—, or N-alkenyl; O-, S- or N-alkynyl; or O-alkyl-O-alkyl, wherein the alkyl, alkenyl and alkynyl can be substituted or unsubstituted C₁ to C₁₀ alkyl or C₂ to C₁₀ alkenyl and alkynyl. Exemplary suitable modifications include O[(CH₂)ₙO]ₘCH₃, O(CH₂)ₙOCH₃, O(CH₂)ₙNH₂, O(CH₂)ₙCH₃, O(CH₂)ₙONH₂, and O(CH₂)ₙON[(CH₂)ₙCH₃)]₂, where n and m are from 1 to about 10. In other embodiments, dsRNAs include one of the following at the 2′ position: C₁ to C₁₀ alkyl, substituted alkyl, alkaryl, aralkyl, O-alkaryl or O-aralkyl, SH, SCH₃, OCN, Cl, Br, CN, CF₃, OCF₃, SOCH₃, SO₂CH₃, ONO₂, NO₂, N₃, NH₂, heterocycloalkyl, heterocycloalkaryl, aminoalkylamino, polyalkylamino, substituted silyl, an RNA cleaving group, a reporter group, an intercalator, a group for improving the pharmacokinetic properties of an RNAi agent, or a group for improving the pharmacodynamic properties of an RNAi agent, and other substituents having similar properties. In some embodiments, the modification includes a 2′-methoxyethoxy (2′-O—CH₂CH₂OCH₃, also known as 2′-O-(2-methoxyethyl) or 2′-MOE) (Martin et al., Helv. Chm. Acta, 1995, 78:486-504) i.e., an alkoxy-alkoxy group. Another exemplary modification is 2′-dimethylaminooxyethoxy, i.e., a O(CH₂)₂ON(CH₃)₂ group, also known as 2′-DMAOE, as described in examples herein below, and 2′-dimethylaminoethoxyethoxy (also known in the art as 2′-O-dimethylaminoethoxyethyl or 2′-DMAEOE), i.e., 2′-O—CH₂—O—CH₂—N(CH₃)₂. Further exemplary modifications include: 5′-Me-2′-F nucleotides, 5′-Me-2′-OMe nucleotides, 5′-Me-2′-deoxynucleotides, (both R and S isomers in these three families); 2′-alkoxyalkyl; and 2′-NMA (N-methylacetamide).

[0239] Other modifications include 2′-methoxy (2′-OCH₃), 2′-aminopropoxy (2′-OCH₂CH₂CH₂NH₂), 2′-O-hexadecyl, and 2′-fluoro (2′-F). Similar modifications can also be made at other positions on the RNA of an RNAi agent, particularly the 3′ position of the sugar on the 3′ terminal nucleotide or in 2′-5′ linked dsRNAs and the 5′ position of 5′ terminal nucleotide. RNAi agents can also have sugar mimetics such as cyclobutyl moieties in place of the pentofuranosyl sugar. Representative U.S. patents that teach the preparation of such modified sugar structures include, but are not limited to, U.S. Pat. Nos. 4,981,957; 5,118,800; 5,319,080; 5,359,044; 5,393,878; 5,446,137; 5,466,786; 5,514,785; 5,519,134; 5,567,811; 5,576,427; 5,591,722; 5,597,909; 5,610,300; 5,627,053; 5,639,873; 5,646,265; 5,658,873; 5,670,633; and 5,700,920, certain of which are commonly owned with the instant application. The entire contents of each of the foregoing are hereby incorporated herein by reference.

[0240] An RNAi agent of the disclosure can also include nucleobase (often referred to in the art simply as “base”) modifications or substitutions. As used herein, “unmodified” or “natural” nucleobases include the purine bases adenine (A) and guanine (G), and the pyrimidine bases thymine (T), cytosine (C) and uracil (U). Modified nucleobases include other synthetic and natural nucleobases such as 5-methylcytosine (5-me-C), 5-hydroxymethyl cytosine, xanthine, hypoxanthine, 2-aminoadenine, 6-methyl and other alkyl derivatives of adenine and guanine, 2-propyl and other alkyl derivatives of adenine and guanine, 2-thiouracil, 2-thiothymine and 2-thiocytosine, 5-halouracil and cytosine, 5-propynyl uracil and cytosine, 6-azo uracil, cytosine and thymine, 5-uracil (pseudouracil), 4-thiouracil, 8-halo, 8-amino, 8-thiol, 8-thioalkyl, 8-hydroxyl anal other 8-substituted adenines and guanines, 5-halo, particularly 5-bromo, 5-trifluoromethyl and other 5-substituted uracils and cytosines, 7-methylguanine and 7-methyladenine, 8-azaguanine and 8-azaadenine, 7-deazaguanine and 7-daazaadenine and 3-deazaguanine and 3-deazaadenine. Further modified nucleobases include those disclosed in U.S. Pat. No. 3,687,808, those disclosed in Modified Nucleosides in Biochemistry, Biotechnology and Medicine, Herdewijn, P. ed. Wiley-VCH, 2008; those disclosed in The Concise Encyclopedia Of Polymer Science And Engineering, pages 858-859, Kroschwitz, J. L, ed. John Wiley & Sons, 1990, these disclosed by Englisch et al., (1991) Angewandte Chemie, International Edition, 30:613, and those disclosed by Sanghvi, Y S., Chapter 15, dsRNA Research and Applications, pages 289-302, Crooke, S. T. and Lebleu, B., Ed., CRC Press, 1993. Certain of these modified nucleobases are particularly useful for increasing the binding affinity of the oligomeric compounds featured in the disclosure. These include 5-substituted pyrimidines, 6-azapyrimidines and N-2, N-6 and 0-6 substituted purines, including 2-aminopropyladenine, 5-propynyluracil and 5-propynylcytosine. 5-methylcytosine substitutions have been shown to increase nucleic acid duplex stability by 0.6-1.2° C. (Sanghvi, Y. S., Crooke, S. T. and Lebleu, B., Eds., dsRNA Research and Applications, CRC Press, Boca Raton, 1993, pp. 276-278) and are exemplary base substitutions, even more particularly when combined with 2′-O-methoxyethyl sugar modifications.

[0241] Representative U.S. patents that teach the preparation of certain of the above noted modified nucleobases as well as other modified nucleobases include, but are not limited to, the above noted U.S. Pat. Nos. 3,687,808, 4,845,205; 5,130,302; 5,134,066; 5,175,273; 5,367,066; 5,432,272; 5,457,187; 5,459,255; 5,484,908; 5,502,177; 5,525,711; 5,552,540; 5,587,469; 5,594,121, 5,596,091; 5,614,617; 5,681,941; 5,750,692; 6,015,886; 6,147,200; 6,166,197; 6,222,025; 6,235,887; 6,380,368; 6,528,640; 6,639,062; 6,617,438; 7,045,610; 7,427,672; and 7,495,088, the entire contents of each of which are hereby incorporated herein by reference.

[0242] An RNAi agent of the disclosure can also be modified to include one or more bicyclic sugar moieties. A “bicyclic sugar” is a furanosyl ring modified by the bridging of two atoms. A “bicyclic nucleoside” (“BNA”) is a nucleoside having a sugar moiety comprising a bridge connecting two carbon atoms of the sugar ring, thereby forming a bicyclic ring system. In certain embodiments, the bridge connects the 4′-carbon and the 2′-carbon of the sugar ring. Thus, in some embodiments an agent of the disclosure may include one or more locked nucleic acids (LNA). A locked nucleic acid is a nucleotide having a modified ribose moiety in which the ribose moiety comprises an extra bridge connecting the 2′ and 4′ carbons. In other words, an LNA is a nucleotide comprising a bicyclic sugar moiety comprising a 4′-CH2-O-2′ bridge. This structure effectively “locks” the ribose in the 3′-endo structural conformation. The addition of locked nucleic acids to siRNAs has been shown to increase siRNA stability in serum, and to reduce off-target effects (Elmen, J. et al., (2005) Nucleic Acids Research 33(1):439-447; Mook, OR. et al., (2007) Mol Canc Ther 6(3):833-843; Grunweller, A. et al., (2003) Nucleic Acids Research 31(12):3185-3193). Examples of bicyclic nucleosides for use in the polynucleotides of the disclosure include without limitation nucleosides comprising a bridge between the 4′ and the 2′ ribosyl ring atoms. In certain embodiments, the antisense polynucleotide agents of the disclosure include one or more bicyclic nucleosides comprising a 4′ to 2′ bridge. Examples of such 4′ to 2′ bridged bicyclic nucleosides, include but are not limited to 4′-(CH₂)—O-2′ (LNA); 4′-(CH₂)—S-2′; 4′-(CH₂)₂—O-2′ (ENA); 4′-CH(CH₃)—O-2′ (also referred to as “constrained ethyl” or “cEt”) and 4′-CH(CH₂OCH₃)—O-2′ (and analogs thereof; see, e.g., U.S. Pat. No. 7,399,845); 4′-C(CH₃)(CH₃)O-2′ (and analogs thereof; see e.g., U.S. Pat. No. 8,278,283); 4′-CH₂—N(OCH₃)-2′ (and analogs thereof; see e.g., U.S. Pat. No. 8,278,425); 4′-CH₂—O—N(CH₃)-2′ (see, e.g., U.S. Patent Publication No. 2004/0171570); 4′-CH₂—N(R)—O-2′, wherein R is H, C₁-C₁₂ alkyl, or a protecting group (see, e.g., U.S. Pat. No. 7,427,672); 4′-CH₂—C(H)(CH₃)-2′ (see, e.g., Chattopadhyaya et al, J. Org. Chem., 2009, 74, 118-134); and 4′-CH₂—C(═CH₂)-2′ (and analogs thereof; see, e.g., U.S. Pat. No. 8,278,426). The entire contents of each of the foregoing are hereby incorporated herein by reference.

[0243] Additional representative US patents and US Patent Publications that teach the preparation of locked nucleic acid nucleotides include, but are not limited to, the following: U.S. Pat. Nos. 6,268,490; 6,525,191; 6,670,461; 6,770,748; 6,794,499; 6,998,484; 7,053,207; 7,034,133; 7,084,125; 7,399,845; 7,427,672; 7,569,686; 7,741,457; 8,022,193; 8,030,467; 8,278,425; 8,278,426; 8,278,283; US 2008/0039618; and US 2009/0012281, the entire contents of each of which are hereby incorporated herein by reference.

[0244] Any of the foregoing bicyclic nucleosides can be prepared having one or more stereochemical sugar configurations including for example α-L-ribofuranose and β-D-ribofuranose (see WO 99/14226).

[0245] An RNAi agent of the disclosure can also be modified to include one or more constrained ethyl nucleotides. As used herein, a “constrained ethyl nucleotide” or “cEt” is a locked nucleic acid comprising a bicyclic sugar moiety comprising a 4′-CH(CH3)-0-2′ bridge. In one embodiment, a constrained ethyl nucleotide is in the S conformation referred to herein as “S-cEt.”

[0246] An RNAi agent of the disclosure may also include one or more “conformationally restricted nucleotides” (“CRN”). CRN are nucleotide analogs with a linker connecting the C2′ and C4′ carbons of ribose or the C3 and —C5′ carbons of ribose. CRN lock the ribose ring into a stable conformation and increase the hybridization affinity to mRNA. The linker is of sufficient length to place the oxygen in an optimal position for stability and affinity resulting in less ribose ring puckering.

[0247] Representative publications that teach the preparation of certain of the above noted CRN include, but are not limited to, US 2013/0190383; and WO 2013/036868, the entire contents of each of which are hereby incorporated herein by reference.

[0248] In some embodiments, an RNAi agent of the disclosure comprises one or more monomers that are UNA (unlocked nucleic acid) nucleotides. UNA is unlocked acyclic nucleic acid, wherein any of the bonds of the sugar has been removed, forming an unlocked “sugar” residue. In one example, UNA also encompasses monomer with bonds between C1′-C4′ have been removed (i.e. the covalent carbon-oxygen-carbon bond between the C1′ and C4′ carbons). In another example, the C2′-C3′ bond (i.e. the covalent carbon-carbon bond between the C2′ and C3′ carbons) of the sugar has been removed (see Nuc. Acids Symp. Series, 52, 133-134 (2008) and Fluiter et al., Mol. Biosyst., 2009, 10, 1039 hereby incorporated by reference).

[0249] Representative U.S. publications that teach the preparation of UNA include, but are not limited to, U.S. Pat. No. 8,314,227; and US Patent Publication Nos. 2013/0096289; 2013/0011922; and 2011/0313020, the entire contents of each of which are hereby incorporated herein by reference.

[0250] An RNAi agent of the disclosure may also include one or more “cyclohexene nucleic acids” or (“CeNA”). CeNA are nucleotide analogs with a replacement of the furanose moiety of DNA by a cyclohexene ring. Incorporation of cylcohexenyl nucleosides in a DNA chain increases the stability of a DNA/RNA hybrid. CeNA is stable against degradation in serum and a CeNA/RNA hybrid is able to activate E. coli RNase H, resulting in cleavage of the RNA strand. (see Wang et al., Am. Chem. Soc. 2000, 122, 36, 8595-8602, hereby incorporated by reference).

[0251] Potentially stabilizing modifications to the ends of RNA molecules can include N-(acetylaminocaproyl)-4-hydroxyprolinol (Hyp-C6-NHAc), N-(caproyl-4-hydroxyprolinol (Hyp-C6), N-(acetyl-4-hydroxyprolinol (Hyp-NHAc), thymidine-2′-O-deoxythymidine (ether), N-(aminocaproyl)-4-hydroxyprolinol (Hyp-C6-amino), 2-docosanoyl-uridine-3″-phosphate, inverted base dT(idT) and others. Disclosure of this modification can be found in WO 2011/005861.

[0252] Other modifications of an RNAi agent of the disclosure include a 5′ phosphate or 5′ phosphate mimic, e.g., a 5′-terminal phosphate or phosphate mimic on the antisense strand of an RNAi agent. Suitable phosphate mimics are disclosed in, for example US 2012/0157511, the entire contents of which are incorporated herein by reference. In one embodiment, the double stranded RNAi agent of the invention further comprises a 5′-phosphate or a 5′-phosphate mimic at the 5′ nucleotide of the antisense strand. In another embodiment, the double stranded RNAi agent further comprises a 5′-phosphate mimic at the 5′ nucleotide of the antisense strand. In a specific embodiment, the 5′-phosphate mimic is a 5′-vinyl phosphonate (5′-VP). In one embodiment, the phosphate mimic is a 5′-cyclopropyl phosphonate (VP). In some embodiments, the 5′-end of the antisense strand of the double-stranded iRNA agent does not contain a 5′-vinyl phosphonate (VP).

[0253] In one embodiment, at least one of the modified nucleotides is selected from the group consisting of a deoxy-nucleotide, a 2′-O-methyl modified nucleotide, a 2′-fluoro modified nucleotide, a 2′-deoxy-modified nucleotide, a glycol modified nucleotide (GNA), e.g., Ggn, Cgn, Tgn, or Agn, a nucleotide with a 2′ phosphate, e.g., G2p, C2p, A2p or U2p, and, a vinyl-phosphonate nucleotide; and combinations thereof. In other embodiments, each of the duplexes of Tables 3 and 4 may be particularly modified to provide another double-stranded iRNA agent of the present disclosure. In one example, the 3′-terminus of each sense duplex may be modified by removing the 3′-terminal L96 ligand and exchanging the two phosphodiester internucleotide linkages between the three 3′-terminal nucleotides with phosphorothioate internucleotide linkages. That is, the three 3′-terminal nucleotides (N) of a sense sequence of the formula:

5′-N₁— . . . —Nₙ₋₂Nₙ₋₁NₙL96 3′

may be replaced with

5′-N₁— . . . —Nₙ₋₂sNₙ₋₁sNₙ3′;

while the antisense sequence remains unchanged to provide another double-stranded iRNA agent of the present disclosure.

### A. Modified RNAi Agents Comprising Motifs of the Disclosure

[0254] In certain aspects of the disclosure, the double-stranded RNAi agents of the disclosure include agents with chemical modifications as disclosed, for example, in WO 2013/075035, the entire contents of which are incorporated herein by reference. As shown herein and in WO 2013/075035, a superior result may be obtained by introducing one or more motifs of three identical modifications on three consecutive nucleotides into a sense strand or antisense strand of an RNAi agent, particularly at or near the cleavage site. In some embodiments, the sense strand and antisense strand of the RNAi agent may otherwise be completely modified. The introduction of these motifs interrupts the modification pattern, if present, of the sense or antisense strand. The RNAi agent may be optionally conjugated with a lipophilic ligand, e.g., a C16 ligand, for instance on the sense strand. The RNAi agent may be optionally modified with a (S)-glycol nucleic acid (GNA) modification, for instance on one or more residues of the antisense strand. The resulting RNAi agents present superior gene silencing activity.

[0255] Accordingly, the disclosure provides double stranded RNAi agents capable of inhibiting the expression of a target gene (i.e., an ABLIM3 gene) in vivo. The RNAi agent comprises a sense strand and an antisense strand. Each strand of the RNAi agent may be 15-30 nucleotides in length. For example, each strand may be 16-30 nucleotides in length, 17-30 nucleotides in length, 25-30 nucleotides in length, 27-30 nucleotides in length, 17-23 nucleotides in length, 17-21 nucleotides in length, 17-19 nucleotides in length, 19-25 nucleotides in length, 19-23 nucleotides in length, 19-21 nucleotides in length, 21-25 nucleotides in length, or 21-23 nucleotides in length. In certain embodiments, each strand is 19-23 nucleotides in length.

[0256] The sense strand and antisense strand typically form a duplex double stranded RNA (“dsRNA”), also referred to herein as an “RNAi agent.” The duplex region of an RNAi agent may be 15-30 nucleotide pairs in length. For example, the duplex region can be 16-30 nucleotide pairs in length, 17-30 nucleotide pairs in length, 27-30 nucleotide pairs in length, 17-23 nucleotide pairs in length, 17-21 nucleotide pairs in length, 17-19 nucleotide pairs in length, 19-25 nucleotide pairs in length, 19-23 nucleotide pairs in length, 19-21 nucleotide pairs in length, 21-25 nucleotide pairs in length, or 21-23 nucleotide pairs in length. In another example, the duplex region is selected from 15, 16, 17, 18, 19, 20, 21, 22, 23, 24, 25, 26, and 27 nucleotides in length. In another embodiment, the duplex region is 19-21 nucleotide pairs in length.

[0257] In one embodiment, the RNAi agent may contain one or more overhang regions or capping groups at the 3′-end, 5′-end, or both ends of one or both strands. The overhang can be 1-6 nucleotides in length, for instance 2-6 nucleotides in length, 1-5 nucleotides in length, 2-5 nucleotides in length, 1-4 nucleotides in length, 2-4 nucleotides in length, 1-3 nucleotides in length, 2-3 nucleotides in length, or 1-2 nucleotides in length. In another embodiment, the nucleotide overhang region is 2 nucleotides in length. The overhangs can be the result of one strand being longer than the other, or the result of two strands of the same length being staggered. The overhang can form a mismatch with the target mRNA or it can be complementary to the gene sequences being targeted or can be another sequence. The first and second strands can also be joined, e.g., by additional bases to form a hairpin, or by other non-base linkers.

[0258] In one embodiment, the nucleotides in the overhang region of the RNAi agent can each independently be a modified or unmodified nucleotide including, but no limited to 2′-sugar modified, such as, 2-F, 2′-O-methyl, thymidine (T), and any combinations thereof.

[0259] For example, TT can be an overhang sequence for either end on either strand. The overhang can form a mismatch with the target mRNA or it can be complementary to the gene sequences being targeted or can be another sequence.

[0260] The 5′- or 3′-overhangs at the sense strand, antisense strand or both strands of the RNAi agent may be phosphorylated. In some embodiments, the overhang region(s) contains two nucleotides having a phosphorothioate between the two nucleotides, where the two nucleotides can be the same or different. In one embodiment, the overhang is present at the 3′-end of the sense strand, antisense strand, or both strands. In one embodiment, this 3′-overhang is present in the antisense strand. In one embodiment, this 3′-overhang is present in the sense strand.

[0261] The dsRNAi agent may contain only a single overhang, which can strengthen the interference activity of the RNAi, without affecting its overall stability. For example, the single-stranded overhang may be located at the 3′-terminal end of the sense strand or, alternatively, at the 3′-terminal end of the antisense strand. The RNAi may also have a blunt end, located at the 5′-end of the antisense strand (i.e., the 3′-end of the sense strand) or vice versa. Generally, the antisense strand of the RNAi has a nucleotide overhang at the 3′-end, and the 5′-end is blunt. While not wishing to be bound by theory, the asymmetric blunt end at the 5′-end of the antisense strand and 3′-end overhang of the antisense strand favor the guide strand loading into RISC process.

[0262] In one embodiment, the RNAi agent is a double blunt-ended of 19 nucleotides in length, wherein the sense strand contains at least one motif of three 2′-F modifications on three consecutive nucleotides at positions 7, 8, and 9 from the 5′ end. The antisense strand contains at least one motif of three 2′-O-methyl modifications on three consecutive nucleotides at positions 11, 12, and 13 from the 5′ end.

[0263] In another embodiment, the RNAi agent is a double blunt-ended of 20 nucleotides in length, wherein the sense strand contains at least one motif of three 2′-F modifications on three consecutive nucleotides at positions 8, 9, and 10 from the 5′ end. The antisense strand contains at least one motif of three 2′-O-methyl modifications on three consecutive nucleotides at positions 11, 12, and 13 from the 5′ end.

[0264] In yet another embodiment, the RNAi agent is a double blunt-ended of 21 nucleotides in length, wherein the sense strand contains at least one motif of three 2′-F modifications on three consecutive nucleotides at positions 9, 10, and 11 from the 5′ end. The antisense strand contains at least one motif of three 2′-O-methyl modifications on three consecutive nucleotides at positions 11, 12, and 13 from the 5′ end.

[0265] In one embodiment, the RNAi agent comprises a 21 nucleotide sense strand and a 23 nucleotide antisense strand, wherein the sense strand contains at least one motif of three 2′-F modifications on three consecutive nucleotides at positions 9, 10, and 11 from the 5′ end; the antisense strand contains at least one motif of three 2′-O-methyl modifications on three consecutive nucleotides at positions 11, 12, and 13 from the 5′ end, wherein one end of the RNAi agent is blunt, while the other end comprises a 2 nucleotide overhang. Preferably, the 2 nucleotide overhang is at the 3′-end of the antisense strand.

[0266] When the 2 nucleotide overhang is at the 3′-end of the antisense strand, there may be two phosphorothioate internucleotide linkages between the terminal three 3′-nucleotides of the antisense strand, wherein two of the three nucleotides are the overhang nucleotides, and the third nucleotide is a paired nucleotide next to the overhang nucleotide. In one embodiment, the RNAi agent additionally has two phosphorothioate internucleotide linkages between the terminal three nucleotides at both the 5′-end of the sense strand and at the 5′-end of the antisense strand. In one embodiment, every nucleotide in the sense strand and the antisense strand of the RNAi agent, including the nucleotides that are part of the motifs are modified nucleotides. In one embodiment each residue is independently modified with a 2′-O-methyl or 2′-fluoro, e.g., in an alternating motif. Optionally, the RNAi agent further comprises a ligand (e.g., a lipophilic ligand, optionally a C16 ligand).

[0267] In one embodiment, the RNAi agent comprises a sense and an antisense strand, wherein the sense strand is 25-30 nucleotide residues in length, wherein starting from the 5′ terminal nucleotide (position 1) positions 1 to 23 of the first strand comprise at least 8 ribonucleotides; the antisense strand is 36-66 nucleotide residues in length and, starting from the 3′ terminal nucleotide, comprises at least 8 ribonucleotides in the positions paired with positions 1-23 of sense strand to form a duplex; wherein at least the 3′ terminal nucleotide of antisense strand is unpaired with sense strand, and up to 6 consecutive 3′ terminal nucleotides are unpaired with sense strand, thereby forming a 3′ single stranded overhang of 1-6 nucleotides; wherein the 5′ terminus of antisense strand comprises from 10-30 consecutive nucleotides which are unpaired with sense strand, thereby forming a 10-30 nucleotide single stranded 5′ overhang; wherein at least the sense strand 5′ terminal and 3′ terminal nucleotides are base paired with nucleotides of antisense strand when sense and antisense strands are aligned for maximum complementarity, thereby forming a substantially duplexed region between sense and antisense strands; and antisense strand is sufficiently complementary to a target RNA along at least 19 ribonucleotides of antisense strand length to reduce target gene expression when the double stranded nucleic acid is introduced into a mammalian cell; and wherein the sense strand contains at least one motif of three 2′-F modifications on three consecutive nucleotides, where at least one of the motifs occurs at or near the cleavage site. The antisense strand contains at least one motif of three 2′-O-methyl modifications on three consecutive nucleotides at or near the cleavage site.

[0268] In one embodiment, the dsRNAi agent comprises sense and antisense strands, wherein the dsRNAi agent comprises a first strand having a length which is at least 25 and at most 29 nucleotides and a second strand having a length which is at most 30 nucleotides with at least one motif of three 2′-O-methyl modifications on three consecutive nucleotides at position 11, 12, and 13 from the 5′ end; wherein the 3′ end of the first strand and the 5′ end of the second strand form a blunt end and the second strand is 1-4 nucleotides longer at its 3′ end than the first strand, wherein the duplex region which is at least 25 nucleotides in length, and the second strand is sufficiently complementary to a target mRNA along at least 19 nucleotide of the second strand length to reduce target gene expression when the RNAi agent is introduced into a mammalian cell, and wherein dicer cleavage of the RNAi agent preferentially results in an siRNA comprising the 3′ end of the second strand, thereby reducing expression of the target gene in the mammal. Optionally, the RNAi agent further comprises a ligand.

[0269] In one embodiment, the sense strand of the RNAi agent contains at least one motif of three identical modifications on three consecutive nucleotides, where one of the motifs occurs at the cleavage site in the sense strand.

[0270] In one embodiment, the antisense strand of the RNAi agent can also contain at least one motif of three identical modifications on three consecutive nucleotides, where one of the motifs occurs at or near the cleavage site in the antisense strand.

[0271] For an RNAi agent having a duplex region of 17-23 nucleotide in length, the cleavage site of the antisense strand is typically around the 10, 11 and 12 positions from the 5′-end. Thus the motifs of three identical modifications may occur at the 9, 10, and 11 positions; 10, 11, and 12 positions; 11, 12, and 13 positions; 12, 13, and 14 positions; or 13, 14, and 15 positions of the antisense strand, the count starting from the 1^{st} nucleotide from the 5′-end of the antisense strand, or, the count starting from the 1^{st} paired nucleotide within the duplex region from the 5′-end of the antisense strand. The cleavage site in the antisense strand may also change according to the length of the duplex region of the RNAi from the 5′-end.

[0272] The sense strand of the RNAi agent may contain at least one motif of three identical modifications on three consecutive nucleotides at the cleavage site of the strand; and the antisense strand may have at least one motif of three identical modifications on three consecutive nucleotides at or near the cleavage site of the strand. When the sense strand and the antisense strand form a dsRNA duplex, the sense strand and the antisense strand can be so aligned that one motif of the three nucleotides on the sense strand and one motif of the three nucleotides on the antisense strand have at least one nucleotide overlap, i.e., at least one of the three nucleotides of the motif in the sense strand forms a base pair with at least one of the three nucleotides of the motif in the antisense strand. Alternatively, at least two nucleotides may overlap, or all three nucleotides may overlap.

[0273] In one embodiment, the sense strand of the RNAi agent may contain more than one motif of three identical modifications on three consecutive nucleotides. The first motif may occur at or near the cleavage site of the strand and the other motifs may be a wing modification. The term “wing modification” herein refers to a motif occurring at another portion of the strand that is separated from the motif at or near the cleavage site of the same strand. The wing modification is either adjacent to the first motif or is separated by at least one or more nucleotides. When the motifs are immediately adjacent to each other, then the chemistry of the motifs are distinct from each other and when the motifs are separated by one or more nucleotide than the chemistries can be the same or different. Two or more wing modifications may be present. For instance, when two wing modifications are present, each wing modification may occur at one end relative to the first motif which is at or near cleavage site or on either side of the lead motif.

[0274] Like the sense strand, the antisense strand of the RNAi agent may contain more than one motif of three identical modifications on three consecutive nucleotides, with at least one of the motifs occurring at or near the cleavage site of the strand. This antisense strand may also contain one or more wing modifications in an alignment similar to the wing modifications that may be present on the sense strand.

[0275] In one embodiment, the wing modification on the sense strand or antisense strand of the RNAi agent typically does not include the first one or two terminal nucleotides at the 3′-end, 5′-end or both ends of the strand.

[0276] In another embodiment, the wing modification on the sense strand or antisense strand of the RNAi agent typically does not include the first one or two paired nucleotides within the duplex region at the 3′-end, 5′-end or both ends of the strand.

[0277] When the sense strand and the antisense strand of the RNAi agent each contain at least one wing modification, the wing modifications may fall on the same end of the duplex region, and have an overlap of one, two or three nucleotides.

[0278] When the sense strand and the antisense strand of the RNAi agent each contain at least two wing modifications, the sense strand and the antisense strand can be so aligned that two modifications each from one strand fall on one end of the duplex region, having an overlap of one, two or three nucleotides; two modifications each from one strand fall on the other end of the duplex region, having an overlap of one, two or three nucleotides; two modifications one strand fall on each side of the lead motif, having an overlap of one, two, or three nucleotides in the duplex region.

[0279] In one embodiment, the RNAi agent comprises mismatch(es) with the target, within the duplex, or combinations thereof. The mismatch may occur in the overhang region or the duplex region. The base pair may be ranked on the basis of their propensity to promote dissociation or melting (e.g., on the free energy of association or dissociation of a particular pairing, the simplest approach is to examine the pairs on an individual pair basis, though next neighbor or similar analysis can also be used). In terms of promoting dissociation: A:U is preferred over G:C; G:U is preferred over G:C; and I:C is preferred over G:C (J=inosine). Mismatches, e.g., non-canonical or other than canonical pairings (as described elsewhere herein) are preferred over canonical (A:T, A:U, G:C) pairings; and pairings which include a universal base are preferred over canonical pairings.

[0280] In one embodiment, the RNAi agent comprises at least one of the first 1, 2, 3, 4, or 5 base pairs within the duplex regions from the 5′-end of the antisense strand independently selected from the group of: A:U, G:U, I:C, and mismatched pairs, e.g., non-canonical or other than canonical pairings or pairings which include a universal base, to promote the dissociation of the antisense strand at the 5′-end of the duplex.

[0281] In one embodiment, the nucleotide at the 1 position within the duplex region from the 5′-end in the antisense strand is selected from the group consisting of A, dA, dU, U, and dT. Alternatively, at least one of the first 1, 2 or 3 base pair within the duplex region from the 5′-end of the antisense strand is an AU base pair. For example, the first base pair within the duplex region from the 5′-end of the antisense strand is an AU base pair.

[0282] In another embodiment, the nucleotide at the 3′-end of the sense strand is deoxythimidine (dT). In another embodiment, the nucleotide at the 3′-end of the antisense strand is deoxythimidine (dT). In one embodiment, there is a short sequence of deoxythimidine nucleotides, for example, two dT nucleotides on the 3′-end of the sense or antisense strand.

[0283] In one embodiment, the sense strand sequence may be represented by formula (I):

5′nₚ-Nₐ—(XXX)ᵢ—N_{b}—YYY—N_{b}—(ZZZ)ⱼ—Nₐ-n_{q}3′ (I)
[0284] wherein:
[0285] i and j are each independently 0 or 1;
[0286] p and q are each independently 0-6;
[0287] each Nₐ independently represents an oligonucleotide sequence comprising 0-25 modified nucleotides, each sequence comprising at least two differently modified nucleotides;
[0288] each N_{b} independently represents an oligonucleotide sequence comprising 0-10 modified nucleotides;
[0289] each nₚ and n_{q} independently represent an overhang nucleotide;
[0290] wherein Nb and Y do not have the same modification; and
[0291] XXX, YYY and ZZZ each independently represent one motif of three identical modifications on three consecutive nucleotides. Preferably YYY is all 2′-F modified nucleotides.

[0292] In one embodiment, the Nₐ or N_{b} comprise modifications of alternating pattern.

[0293] In one embodiment, the YYY motif occurs at or near the cleavage site of the sense strand. For example, when the RNAi agent has a duplex region of 17-23 nucleotides in length, the YYY motif can occur at or the vicinity of the cleavage site (e.g.: can occur at positions 6, 7, 8, 7, 8, 9, 8, 9, 10, 9, 10, 11, 10, 11, 12 or 11, 12, 13) of − the sense strand, the count starting from the 1^{st} nucleotide, from the 5′-end; or optionally, the count starting at the 1^{st} paired nucleotide within the duplex region, from the 5′-end.

[0294] In one embodiment, i is 1 and j is 0, or i is 0 and j is 1, or both i and j are 1. The sense strand can therefore be represented by the following formulas:

5′nₚ-Nₐ—YYY—N_{b}—ZZZ—Nₐ-n_{q}3′ (Ib);

5′nₚ-Nₐ—XXX—N_{b}—YYY—Nₐ-n_{q}3′ (Ic); or

5′nₚ-Nₐ—XXX—N_{b}—YYY—N_{b}—ZZZ—Nₐ-n_{q}3′ (Id).

[0295] When the sense strand is represented by formula (Ib), N_{b} represents an oligonucleotide sequence comprising 0-10, 0-7, 0-5, 0-4, 0-2 or 0 modified nucleotides.

[0296] Each Nₐ independently can represent an oligonucleotide sequence comprising 2-20, 2-15, or 2-10 modified nucleotides.

[0297] When the sense strand is represented as formula (Ic), N_{b} represents an oligonucleotide sequence comprising 0-10, 0-7, 0-10, 0-7, 0-5, 0-4, 0-2 or 0 modified nucleotides. Each Nₐ can independently represent an oligonucleotide sequence comprising 2-20, 2-15, or 2-10 modified nucleotides.

[0298] When the sense strand is represented as formula (Id), each N_{b} independently represents an oligonucleotide sequence comprising 0-10, 0-7, 0-5, 0-4, 0-2 or 0 modified nucleotides. Preferably, N_{b} is 0, 1, 2, 3, 4, 5 or 6. Each Nₐ can independently represent an oligonucleotide sequence comprising 2-20, 2-15, or 2-10 modified nucleotides.

[0299] Each of X, Y and Z may be the same or different from each other.

[0300] In other embodiments, i is 0 and j is 0, and the sense strand may be represented by the formula:

5′nₚ-Nₐ—YYY—Nₐ-n_{q}3′ (Ia).

[0301] When the sense strand is represented by formula (Ia), each Nₐ independently can represent an oligonucleotide sequence comprising 2-20, 2-15, or 2-10 modified nucleotides.

[0302] In one embodiment, the antisense strand sequence of the RNAi may be represented by formula (Ie):

5′n_{q′}-Nₐ′—(Z′Z′Z′)ₖ—N_{b}′—Y′Y′Y′—N_{b}′—(X′X′X′)ₗ—N′ₐ-nₚ′3′ (Ie)
[0303] wherein:
[0304] k and l are each independently 0 or 1;
[0305] p′ and q′ are each independently 0-6;
[0306] each Nₐ′ independently represents an oligonucleotide sequence comprising 0-25 modified nucleotides, each sequence comprising at least two differently modified nucleotides;
[0307] each N_{b}′ independently represents an oligonucleotide sequence comprising 0-10 modified nucleotides;
[0308] each nₚ′ and n_{q}′ independently represent an overhang nucleotide;
[0309] wherein N_{b}′ and Y′ do not have the same modification;
[0310] and X′X′X′, Y′Y′Y′ and Z′Z′Z′ each independently represent one motif of three identical modifications on three consecutive nucleotides.

[0311] In one embodiment, the Nₐ′ or N_{b}′ comprise modifications of alternating pattern.

[0312] The Y′Y′Y′ motif occurs at or near the cleavage site of the antisense strand. For example, when the RNAi agent has a duplex region of 17-23 nucleotide in length, the Y′Y′Y′ motif can occur at positions 9, 10, 11; 10, 11, 12; 11, 12, 13; 12, 13, 14; or 13, 14, 15 of the antisense strand, with the count starting from the 1^{st} nucleotide, from the 5′-end; or optionally, the count starting at the 1^{st} paired nucleotide within the duplex region, from the 5′-end. Preferably, the Y′Y′Y′ motif occurs at positions 11, 12, 13.

[0313] In one embodiment, Y′Y′Y′ motif is all 2′-OMe modified nucleotides.

[0314] In one embodiment, k is 1 and l is 0, or k is 0 and l is 1, or both k and l are 1.

[0315] The antisense strand can therefore be represented by the following formulas:

5′n_{q′}-Nₐ′—Z′Z′Z′—N_{b}′—Y′Y′Y′—Nₐ′-n_{p′}3′ (Ig);

5′n_{q′}-Nₐ′—Y′Y′Y′—N_{b}′—X′X′X′-n_{p′}3′ (Ih); or

5′n_{q′}-Nₐ′—Z′Z′Z′—N_{b}′—Y′Y′Y′—N_{b}′—X′X′X′—Nₐ′-n_{p′}3′ (Ii).

[0316] When the antisense strand is represented by formula (Ig), N_{b}′ represents an oligonucleotide sequence comprising 0-10, 0-7, 0-10, 0-7, 0-5, 0-4, 0-2 or 0 modified nucleotides. Each Nₐ′ independently represents an oligonucleotide sequence comprising 2-20, 2-15, or 2-10 modified nucleotides.

[0317] When the antisense strand is represented as formula (Ih), N_{b}′ represents an oligonucleotide sequence comprising 0-10, 0-7, 0-10, 0-7, 0-5, 0-4, 0-2 or 0 modified nucleotides. Each Nₐ′ independently represents an oligonucleotide sequence comprising 2-20, 2-15, or 2-10 modified nucleotides.

[0318] When the antisense strand is represented as formula (Ii), each N_{b}′ independently represents an oligonucleotide sequence comprising 0-10, 0-7, 0-10, 0-7, 0-5, 0-4, 0-2 or 0 modified nucleotides. Each Nₐ′ independently represents an oligonucleotide sequence comprising 2-20, 2-15, or 2-10 modified nucleotides. Preferably, N_{b} is 0, 1, 2, 3, 4, 5 or 6.

[0319] In other embodiments, k is 0 and 1 is 0 and the antisense strand may be represented by the formula:

5′n_{p′}-N_{a′}—Y′Y′Y′—N_{a′}-n_{q′}3′ (If).

[0320] When the antisense strand is represented as formula (If), each Nₐ′ independently represents an oligonucleotide sequence comprising 2-20, 2-15, or 2-10 modified nucleotides.

[0321] Each of X′, Y′ and Z′ may be the same or different from each other.

[0322] Each nucleotide of the sense strand and antisense strand may be independently modified with LNA, HNA, CeNA, 2′-methoxyethyl, 2′-O-methyl, 2′-O-allyl, 2′-C-allyl, 2′-hydroxyl, or 2′-fluoro. For example, each nucleotide of the sense strand and antisense strand is independently modified with 2′-O-methyl or 2-fluoro. Each X, Y, Z, X′, Y′ and Z′, in particular, may represent a 2′-O-methyl modification or a 2′-fluoro modification.

[0323] In one embodiment, the sense strand of the RNAi agent may contain YYY motif occurring at 9, 10 and 11 positions of the strand when the duplex region is 21 nt, the count starting from the 1^{st} nucleotide from the 5′-end, or optionally, the count starting at the 1^{st} paired nucleotide within the duplex region, from the 5′-end; and Y represents 2′-F modification. The sense strand may additionally contain XXX motif or ZZZ motifs as wing modifications at the opposite end of the duplex region; and XXX and ZZZ each independently represents a 2′-OMe modification or 2′-F modification.

[0324] In one embodiment the antisense strand may contain Y′Y′Y′ motif occurring at positions 11, 12, 13 of the strand, the count starting from the 1^{st} nucleotide from the 5′-end, or optionally, the count starting at the 1^{st} paired nucleotide within the duplex region, from the 5′-end; and Y′ represents 2′-O-methyl modification. The antisense strand may additionally contain X′X′X′ motif or Z′Z′Z′ motifs as wing modifications at the opposite end of the duplex region; and X′X′X′ and Z′Z′Z′ each independently represents a 2′-OMc modification or 2′-F modification.

[0325] The sense strand represented by any one of the above formulas (Ia), (Ib), (Ic), and (Id) forms a duplex with an antisense strand being represented by any one of formulas (If), (Ig), (Ih), and (Ii), respectively.

[0326] Accordingly, the RNAi agents for use in the methods of the disclosure may comprise a sense strand and an antisense strand, each strand having 14 to 30 nucleotides, the RNAi duplex represented by formula (Ij):

sense: 5′nₚ-Nₐ—(XXX)ᵢ—N_{b}—YYY—N_{b}—(ZZZ)ⱼ—Nₐ-n_{q}3′

antisense: 3′nₚ′—Nₐ′—(X′X′X′)ₖ—N_{b}′—Y′Y′Y′—N_{b}′—(Z′Z′Z′)ₗ—Nₐ′-n_{q}′5′ (Ij)
[0327] wherein:
[0328] i, j, k, and l are each independently 0 or 1;
[0329] p, p′, q, and q′ are each independently 0-6;
[0330] each Nₐ and Nₐ independently represents an oligonucleotide sequence comprising 0-25 modified nucleotides, each sequence comprising at least two differently modified nucleotides;
[0331] each N_{b} and N_{b} independently represents an oligonucleotide sequence comprising 0-10 modified nucleotides;
[0332] wherein
[0333] each nₚ′, nₚ, n_{q}′, and n_{q}, each of which may or may not be present, independently represents an overhang nucleotide; and
[0334] XXX, YYY, ZZZ, X′X′X′, Y′Y′Y′, and Z′Z′Z′ each independently represent one motif of three identical modifications on three consecutive nucleotides.

[0335] In one embodiment, i is 0 and j is 0; or i is 1 and j is 0; or i is 0 and j is 1; or both i and j are 0; or both i and j are 1. In another embodiment, k is 0 and l is 0; or k is 1 and l is 0; k is 0 and l is 1; or both k and l are 0; or both k and l are 1.

[0336] Exemplary combinations of the sense strand and antisense strand forming an RNAi duplex include the formulas below:

5′nₚ-Nₐ—YYY—Nₐ-n_{q}3′

3′nₚ′—Nₐ′—Y′Y′Y′—Nₐ′n_{q}′5′ (Ik)

5′nₚ-Nₐ—YYY—N_{b}—ZZZ—Nₐ-n_{q}3′

3′nₚ′—Nₐ′—Y′Y′Y′—N_{b}′—Z′Z′Z′—Nₐ′n_{q}′5′ (Il)

5′nₚ-Nₐ—XXX—N_{b}—YYY—Nₐ-n_{q}3′

3′nₚ′—Nₐ′—X′X′X′—N_{b}′—Y′Y′Y′—Nₐ′-n_{q}′5′ (Im)

5′nₚ-Nₐ—XXX—N_{b}—YYY—N_{b}—ZZZ—Nₐ-n_{q}3′

3′nₚ′—Nₐ′—X′X′X′—N_{b}′—Y′Y′Y′—N_{b}′—Z′Z′Z′—Nₐ′-n_{q}′5′ (In)

[0337] When the RNAi agent is represented by formula (Ik), each Nₐ independently represents an oligonucleotide sequence comprising 2-20, 2-15, or 2-10 modified nucleotides.

[0338] When the RNAi agent is represented by formula (Il), each N_{b} independently represents an oligonucleotide sequence comprising 1-10, 1-7, 1-5 or 1-4 modified nucleotides. Each Nₐ independently represents an oligonucleotide sequence comprising 2-20, 2-15, or 2-10 modified nucleotides.

[0339] When the RNAi agent is represented as formula (Im), each N_{b}, N_{b}′ independently represents an oligonucleotide sequence comprising 0-10, 0-7, 0-10, 0-7, 0-5, 0-4, 0-2 or 0 modified nucleotides. Each Nₐ independently represents an oligonucleotide sequence comprising 2-20, 2-15, or 2-10 modified nucleotides.

[0340] When the RNAi agent is represented as formula (In), each N_{b}, N_{b}′ independently represents an oligonucleotide sequence comprising 0-10, 0-7, 0-10, 0-7, 0-5, 0-4, 0-2 or 0 modified nucleotides. Each Nₐ, Nₐ independently represents an oligonucleotide sequence comprising 2-20, 2-15, or 2-10 modified nucleotides. Each of Nₐ, Nₐ′, N_{b} and N_{b}′ independently comprises modifications of alternating pattern.

[0341] In one embodiment, when the RNAi agent is represented by formula (In), the Nₐ modifications are 2′-O-methyl or 2′-fluoro modifications. In another embodiment, when the RNAi agent is represented by formula (In), the Nₐ modifications are 2′-O-methyl or 2′-fluoro modifications and nₚ′>0 and at least one nₚ′ is linked to a neighboring nucleotide a via phosphorothioate linkage. In yet another embodiment, when the RNAi agent is represented by formula (In), the Nₐ modifications are 2′-O-methyl or 2′-fluoro modifications, nₚ′>0 and at least one nₚ′ is linked to a neighboring nucleotide via phosphorothioate linkage, and the sense strand is conjugated to one or more C16 (or related) moieties attached through a bivalent or trivalent branched linker (described below). In another embodiment, when the RNAi agent is represented by formula (In), the Nₐ modifications are 2′-O-methyl or 2′-fluoro modifications, n′>0 and at least one nₚ′ is linked to a neighboring nucleotide via phosphorothioate linkage, the sense strand comprises at least one phosphorothioate linkage, and the sense strand is conjugated to one or more lipophilic, e.g., C16 (or related) moieties, optionally attached through a bivalent or trivalent branched linker.

[0342] In one embodiment, when the RNAi agent is represented by formula (Ik), the Nₐ modifications are 2′-O-methyl or 2′-fluoro modifications, nₚ′>0 and at least one nₚ′ is linked to a neighboring nucleotide via phosphorothioate linkage, the sense strand comprises at least one phosphorothioate linkage, and the sense strand is conjugated to one or more lipophilic, e.g., C16 (or related) moieties attached through a bivalent or trivalent branched linker.

[0343] In one embodiment, the RNAi agent is a multimer containing at least two duplexes represented by formula (Ij), (Ik), (Il), (Im), and (In), wherein the duplexes are connected by a linker. The linker can be cleavable or non-cleavable. Optionally, the multimer further comprises a ligand. Each of the duplexes can target the same gene or two different genes; or each of the duplexes can target same gene at two different target sites.

[0344] In one embodiment, the RNAi agent is a multimer containing three, four, five, six or more duplexes represented by formula (Ij), (Ik), (Il), (Im), and (In), wherein the duplexes are connected by a linker. The linker can be cleavable or non-cleavable. Optionally, the multimer further comprises a ligand. Each of the duplexes can target the same gene or two different genes; or each of the duplexes can target same gene at two different target sites.

[0345] In one embodiment, two RNAi agents represented by formula (Ij), (Ik), (Il), (Im), and (In) are linked to each other at the 5′ end, and one or both of the 3′ ends and are optionally conjugated to a ligand. Each of the agents can target the same gene or two different genes; or each of the agents can target same gene at two different target sites.

[0346] Various publications describe multimeric RNAi agents that can be used in the methods of the disclosure. Such publications include WO2007/091269. WO2010/141511, WO2007/117686, WO2009/014887, and WO2011/031520; and U.S. Pat. No. 7,858,769, the entire contents of each of which are hereby incorporated herein by reference.

[0347] In certain embodiments, the compositions and methods of the disclosure include a vinyl phosphonate (VP) modification of an RNAi agent as described herein. In exemplary embodiments, a 5′-vinyl phosphonate modified nucleotide of the disclosure has the structure:

[chemical structure]

[0348] wherein X is O or S;
[0349] R is hydrogen, hydroxy, fluoro, or C₁₋₂₀alkoxy (e.g., methoxy or n-hexadecyloxy);
[0350] R^{5′} is ═C(H)—P(O)(OH)₂ and the double bond between the C5′ carbon and R^{5′} is in the E or Z orientation (e.g., E orientation); and
[0351] B is a nucleobase or a modified nucleobase, optionally where B is adenine, guanine, cytosine, thymine, or uracil.

[0352] In one embodiment, R^{5′} is ═C(H)—P(O)(OH)₂ and the double bond between the C5′ carbon and R5′ is in the E orientation. In another embodiment, R is methoxy and R^{5′} is ═C(H)—P(O)(OH)₂ and the double bond between the C5′ carbon and R^{5′} is in the E orientation. In another embodiment, X is S, R is methoxy, and R^{5′} is ═C(H)—P(O)(OH)₂ and the double bond between the C5′ carbon and R5′ is in the E orientation.

[0353] A vinyl phosphonate of the instant disclosure may be attached to either the antisense or the sense strand of a dsRNA of the disclosure. In certain embodiments, a vinyl phosphonate of the instant disclosure is attached to the antisense strand of a dsRNA, optionally at the 5′ end of the antisense strand of the dsRNA. The dsRNA agent can comprise a phosphorus-containing group at the 5′-end of the sense strand or antisense strand. The 5′-end phosphorus-containing group can be 5′-end phosphate (5′-P), 5′-end phosphorothioate (5′-PS), 5′-end phosphorodithioate (5′-PS2), 5′-end vinylphosphonate (5′-VP), 5′-end methylphosphonate (MePhos), or 5′-deoxy-5′-C-malonyl. When the 5′-end phosphorus-containing group is 5′-end vinylphosphonate (5′-VP), the 5′-VP can be either 5′-E-VP isomer (i.e., trans-vinylphosphonate,

[chemical structure]

5′-Z—VP isomer (i.e., cis-vinylphosphonate,

[chemical structure]

or mixtures thereof.

[0354] Vinyl phosphate modifications are also contemplated for the compositions and methods of the instant disclosure. An exemplary vinyl phosphate structure is:

[chemical structure]

For example, when the phosphate mimic is a 5′-vinyl phosphate, the 5′-terminal nucleotide can have the immediately structure, where the phosphonate group is replaced by a phosphate.
i. Thermally Destabilizing Modifications

[0355] In certain embodiments, a dsRNA molecule can be optimized for RNA interference by incorporating thermally destabilizing modifications in the seed region of the antisense strand. As used herein “seed region” means at positions 2-9 of the 5′-end of the referenced strand. For example, thermally destabilizing modifications can be incorporated in the seed region of the antisense strand to reduce or inhibit off-target gene silencing.

[0356] The term “thermally destabilizing modification(s)” includes modification(s) that would result with a dsRNA with a lower overall melting temperature (Tₘ) than the Tₘ of the dsRNA without having such modification(s). For example, the thermally destabilizing modification(s) can decrease the Tₘ of the dsRNA by 1-4° C., such as one, two, three or four degrees Celsius. And, the term “thermally destabilizing nucleotide” refers to a nucleotide containing one or more thermally destabilizing modifications.

[0357] It has been discovered that dsRNAs with an antisense strand comprising at least one thermally destabilizing modification of the duplex within the first 9 nucleotide positions, counting from the 5′ end, of the antisense strand have reduced off-target gene silencing activity. Accordingly, in some embodiments, the antisense strand comprises at least one (e.g., one, two, three, four, five or more) thermally destabilizing modification of the duplex within the first 9 nucleotide positions of the 5′ region of the antisense strand. In some embodiments, one or more thermally destabilizing modification(s) of the duplex is/are located in positions 2-9, or preferably positions 4-8, from the 5′-end of the antisense strand. In some further embodiments, the thermally destabilizing modification(s) of the duplex is/are located at position 6, 7 or 8 from the 5′-end of the antisense strand. In still some further embodiments, the thermally destabilizing modification of the duplex is located at position 7 from the 5′-end of the antisense strand. In some embodiments, the thermally destabilizing modification of the duplex is located at position 2, 3, 4, 5 or 9 from the 5′-end of the antisense strand.

[0358] The thermally destabilizing modifications can include, but are not limited to, abasic modification; mismatch with the opposing nucleotide in the opposing strand; and sugar modification such as 2′-deoxy modification or acyclic nucleotide, e.g., unlocked nucleic acids (UNA) or glycol nucleic acid (GNA).

[0359] Exemplified abasic modifications include, but are not limited to the following:

[chemical structure]

### Wherein R=H, Me, Et or OMe; R′=H, Me, Et or OMe; R″=H, Me, Et or OMe

[chemical structure]

wherein B is a modified or unmodified nucleobase.

[0360] Exemplified sugar modifications include, but are not limited to the following:

[chemical structure]

[chemical structure]

wherein B is a modified or unmodified nucleobase.

[0361] In some embodiments the thermally destabilizing modification of the duplex is selected from the group consisting of:

[chemical structure]

wherein B is a modified or unmodified nucleobase and the asterisk on each structure represents either R, S or racemic.

[0362] In some embodiments the thermally destabilizing modification of the duplex is selected from the group consisting of:

[chemical structure]

wherein B is a modified or unmodified nucleobase and the asterisk represents either R, S or racemic (e.g. S).

[0363] The term “acyclic nucleotide” refers to any nucleotide having an acyclic ribose sugar, for example, where any of bonds between the ribose carbons (e.g., C1′-C2′, C2′-C3′, C3′-C4′, C4′-O4′, or C1′-O4′) is absent or at least one of ribose carbons or oxygen (e.g., C1′, C2′, C3′, C4′ or O4′) are independently or in combination absent from the nucleotide. In some embodiments, acyclic nucleotide is

[chemical structure]

wherein B is a modified or unmodified nucleobase, R¹ and R² independently are H, halogen, OR₃, or alkyl; and R₃ is H, alkyl, cycloalkyl, aryl, aralkyl, heteroaryl or sugar). The term “UNA” refers to unlocked acyclic nucleic acid, wherein any of the bonds of the sugar has been removed, forming an unlocked “sugar” residue. In one example, UNA also encompasses monomers with bonds between C1′-C4′ being removed (i.e. the covalent carbon-oxygen-carbon bond between the C1′ and C4′ carbons). In another example, the C2′-C3′ bond (i.e. the covalent carbon-carbon bond between the C2 and C3′ carbons) of the sugar is removed (see Mikhailov et. al., Tetrahedron Letters, 26 (17): 2059 (1985); and Fluiter et al., Mol. Biosyst., 10: 1039 (2009), which are hereby incorporated by reference in their entirety). The acyclic derivative provides greater backbone flexibility without affecting the Watson-Crick pairings. The acyclic nucleotide can be linked via 2′-5′ or 3′-5′ linkage.

[0364] The term ‘GNA’ refers to glycol nucleic acid which is a polymer similar to DNA or RNA but differing in the composition of its “backbone” in that is composed of repeating glycerol units linked by phosphodiester bonds:

[chemical structure]

[0365] The thermally destabilizing modification of the duplex can be mismatches (i.e., noncomplementary base pairs) between the thermally destabilizing nucleotide and the opposing nucleotide in the opposite strand within the dsRNA duplex. Exemplary mismatch base pairs include G:G, G:A, G:U, G:T, A:A, A:C, C:C, C:U, C:T, U:U, T:T, U:T, or a combination thereof. Other mismatch base pairings known in the art are also amenable to the present invention. A mismatch can occur between nucleotides that are either naturally occurring nucleotides or modified nucleotides, i.e., the mismatch base pairing can occur between the nucleobases from respective nucleotides independent of the modifications on the ribose sugars of the nucleotides. In certain embodiments, the dsRNA molecule contains at least one nucleobase in the mismatch pairing that is a 2′-deoxy nucleobase; e.g., the 2′-deoxy nucleobase is in the sense strand.

[0366] In some embodiments, the thermally destabilizing modification of the duplex in the seed region of the antisense strand includes nucleotides with impaired W—C H-bonding to complementary base on the target mRNA such as

[chemical structure]

[0367] More examples of abasic nucleotide, acyclic nucleotide modifications (including UNA and GNA), and mismatch modifications have been described in detail in WO 2011/133876, which is herein incorporated by reference in its entirety.

[0368] The thermally destabilizing modifications may also include universal base with reduced or abolished capability to form hydrogen bonds with the opposing bases, and phosphate modifications.

[0369] In some embodiments, the thermally destabilizing modification of the duplex includes nucleotides with non-canonical bases such as, but not limited to, nucleobase modifications with impaired or completely abolished capability to form hydrogen bonds with bases in the opposite strand. These nucleobase modifications have been evaluated for destabilization of the central region of the dsRNA duplex as described in WO 2010/0011895, which is herein incorporated by reference in its entirety. Exemplary nucleobase modifications are:

[chemical structure]

[0370] In some embodiments, the thermally destabilizing modification of the duplex in the seed region of the antisense strand includes one or more α-nucleotide complementary to the base on the target mRNA, such as:

[chemical structure]

wherein R is H, OH, OCH₃, F, NH₂, NHMe, NMe₂ or O-alkyl.

[0371] Exemplary phosphate modifications known to decrease the thermal stability of dsRNA duplexes compared to natural phosphodiester linkages are:

[chemical structure]

[0372] The alkyl for the R group can be a C₁-C₆alkyl. Specific alkyls for the R group include, but are not limited to methyl, ethyl, propyl, isopropyl, butyl, pentyl and hexyl.

[0373] As the skilled artisan will recognize, in view of the functional role of nucleobases is defining specificity of an RNAi agent of the disclosure, while nucleobase modifications can be performed in the various manners as described herein, e.g., to introduce destabilizing modifications into an RNAi agent of the disclosure, e.g., for purpose of enhancing on-target effect relative to off-target effect, the range of modifications available and, in general, present upon RNAi agents of the disclosure tends to be much greater for non-nucleobase modifications, e.g., modifications to sugar groups or phosphate backbones of polyribonucleotides. Such modifications are described in greater detail in other sections of the instant disclosure and are expressly contemplated for RNAi agents of the disclosure, either possessing native nucleobases or modified nucleobases as described above or elsewhere herein.

[0374] In addition to the antisense strand comprising a thermally destabilizing modification, the dsRNA can also comprise one or more stabilizing modifications. For example, the dsRNA can comprise at least two (e.g., two, three, four, five, six, seven, eight, nine, ten or more) stabilizing modifications. Without limitations, the stabilizing modifications all can be present in one strand. In some embodiments, both the sense and the antisense strands comprise at least two stabilizing modifications. The stabilizing modification can occur on any nucleotide of the sense strand or antisense strand. For instance, the stabilizing modification can occur on every nucleotide on the sense strand or antisense strand; each stabilizing modification can occur in an alternating pattern on the sense strand or antisense strand; or the sense strand or antisense strand comprises both stabilizing modification in an alternating pattern. The alternating pattern of the stabilizing modifications on the sense strand may be the same or different from the antisense strand, and the alternating pattern of the stabilizing modifications on the sense strand can have a shift relative to the alternating pattern of the stabilizing modifications on the antisense strand.

[0375] In some embodiments, the antisense strand comprises at least two (e.g., two, three, four, five, six, seven, eight, nine, ten or more) stabilizing modifications. Without limitations, a stabilizing modification in the antisense strand can be present at any positions. In some embodiments, the antisense comprises stabilizing modifications at positions 2, 6, 8, 9, 14, and 16 from the 5′-end. In some other embodiments, the antisense comprises stabilizing modifications at positions 2, 6, 14, and 16 from the 5′-end. In still some other embodiments, the antisense comprises stabilizing modifications at positions 2, 14, and 16 from the 5′-end.

[0376] In some embodiments, the antisense strand comprises at least one stabilizing modification adjacent to the destabilizing modification. For example, the stabilizing modification can be the nucleotide at the 5′-end or the 3′-end of the destabilizing modification, i.e., at position −1 or +1 from the position of the destabilizing modification. In some embodiments, the antisense strand comprises a stabilizing modification at each of the 5′-end and the 3′-end of the destabilizing modification, i.e., positions −1 and +1 from the position of the destabilizing modification.

[0377] In some embodiments, the antisense strand comprises at least two stabilizing modifications at the 3′-end of the destabilizing modification, i.e., at positions+1 and +2 from the position of the destabilizing modification.

[0378] In some embodiments, the sense strand comprises at least two (e.g., two, three, four, five, six, seven, eight, nine, ten or more) stabilizing modifications. Without limitations, a stabilizing modification in the sense strand can be present at any positions. In some embodiments, the sense strand comprises stabilizing modifications at positions 7, 10, and 11 from the 5′-end. In some other embodiments, the sense strand comprises stabilizing modifications at positions 7, 9, 10, and 11 from the 5′-end. In some embodiments, the sense strand comprises stabilizing modifications at positions opposite or complementary to positions 11, 12, and 15 of the antisense strand, counting from the 5′-end of the antisense strand. In some other embodiments, the sense strand comprises stabilizing modifications at positions opposite or complementary to positions 11, 12, 13, and 15 of the antisense strand, counting from the 5′-end of the antisense strand. In some embodiments, the sense strand comprises a block of two, three, or four stabilizing modifications.

[0379] In some embodiments, the sense strand does not comprise a stabilizing modification in position opposite or complementary to the thermally destabilizing modification of the duplex in the antisense strand.

[0380] Exemplary thermally stabilizing modifications include, but are not limited to, 2′-fluoro modifications. Other thermally stabilizing modifications include, but are not limited to, LNA.

[0381] In some embodiments, the dsRNA of the disclosure comprises at least four (e.g., four, five, six, seven, eight, nine, ten, or more) 2′-fluoro nucleotides. Without limitations, the 2′-fluoro nucleotides all can be present in one strand. In some embodiments, both the sense and the antisense strands comprise at least two 2′-fluoro nucleotides. The 2′-fluoro modification can occur on any nucleotide of the sense strand or antisense strand. For instance, the 2′-fluoro modification can occur on every nucleotide on the sense strand or antisense strand; each 2′-fluoro modification can occur in an alternating pattern on the sense strand or antisense strand; or the sense strand or antisense strand comprises both 2′-fluoro modifications in an alternating pattern. The alternating pattern of the 2′-fluoro modifications on the sense strand may be the same or different from the antisense strand, and the alternating pattern of the 2′-fluoro modifications on the sense strand can have a shift relative to the alternating pattern of the 2′-fluoro modifications on the antisense strand.

[0382] In some embodiments, the antisense strand comprises at least two (e.g., two, three, four, five, six, seven, eight, nine, ten, or more) 2′-fluoro nucleotides. Without limitations, a 2′-fluoro modification in the antisense strand can be present at any positions. In some embodiments, the antisense comprises 2′-fluoro nucleotides at positions 2, 6, 8, 9, 14, and 16 from the 5′-end. In some other embodiments, the antisense comprises 2′-fluoro nucleotides at positions 2, 6, 14, and 16 from the 5′-end. In still some other embodiments, the antisense comprises 2′-fluoro nucleotides at positions 2, 14, and 16 from the 5′-end.

[0383] In some embodiments, the antisense strand comprises at least one 2′-fluoro nucleotide adjacent to the destabilizing modification. For example, the 2′-fluoro nucleotide can be the nucleotide at the 5′-end or the 3′-end of the destabilizing modification, i.e., at position −1 or +1 from the position of the destabilizing modification. In some embodiments, the antisense strand comprises a 2′-fluoro nucleotide at each of the 5′-end and the 3′-end of the destabilizing modification, i.e., positions −1 and +1 from the position of the destabilizing modification.

[0384] In some embodiments, the antisense strand comprises at least two 2′-fluoro nucleotides at the 3′-end of the destabilizing modification, i.e., at positions +1 and +2 from the position of the destabilizing modification.

[0385] In some embodiments, the sense strand comprises at least two (e.g., two, three, four, five, six, seven, eight, nine, ten or more) 2′-fluoro nucleotides. Without limitations, a 2′-fluoro modification in the sense strand can be present at any positions. In some embodiments, the antisense comprises 2′-fluoro nucleotides at positions 7, 10, and 11 from the 5′-end. In some other embodiments, the sense strand comprises 2′-fluoro nucleotides at positions 7, 9, 10, and 11 from the 5′-end. In some embodiments, the sense strand comprises 2′-fluoro nucleotides at positions opposite or complementary to positions 11, 12, and 15 of the antisense strand, counting from the 5′-end of the antisense strand. In some other embodiments, the sense strand comprises 2′-fluoro nucleotides at positions opposite or complementary to positions 11, 12, 13, and 15 of the antisense strand, counting from the 5′-end of the antisense strand. In some embodiments, the sense strand comprises a block of two, three or four 2′-fluoro nucleotides.

[0386] In some embodiments, the sense strand does not comprise a 2′-fluoro nucleotide in position opposite or complementary to the thermally destabilizing modification of the duplex in the antisense strand.

[0387] In some embodiments, the dsRNA molecule of the disclosure comprises a 21 nucleotides (nt) sense strand and a 23 nucleotides (nt) antisense, wherein the antisense strand contains at least one thermally destabilizing nucleotide, where the at least one thermally destabilizing nucleotide occurs in the seed region of the antisense strand (i.e., at position 2-9 of the 5′-end of the antisense strand), wherein one end of the dsRNA is blunt, while the other end is comprises a 2 nt overhang, and wherein the dsRNA optionally further has at least one (e.g., one, two, three, four, five, six or all seven) of the following characteristics: (i) the antisense comprises 2, 3, 4, 5 or 6 2′-fluoro modifications; (ii) the antisense comprises 1, 2, 3, 4 or 5 phosphorothioate internucleotide linkages; (iii) the sense strand is conjugated with a ligand; (iv) the sense strand comprises 2, 3, 4 or 5 2′-fluoro modifications; (v) the sense strand comprises 1, 2, 3, 4 or 5 phosphorothioate internucleotide linkages; (vi) the dsRNA comprises at least four 2′-fluoro modifications; and (vii) the dsRNA comprises a blunt end at 5′-end of the antisense strand. Preferably, the 2 nt overhang is at the 3′-end of the antisense.

[0388] In some embodiments, the dsRNA molecule of the disclosure comprising a sense and antisense strands, wherein: the sense strand is 25-30 nucleotide residues in length, wherein starting from the 5′ terminal nucleotide (position 1), positions 1 to 23 of said sense strand comprise at least 8 ribonucleotides; antisense strand is 36-66 nucleotide residues in length and, starting from the 3′ terminal nucleotide, at least 8 ribonucleotides in the positions paired with positions 1-23 of sense strand to form a duplex; wherein at least the 3′ terminal nucleotide of antisense strand is unpaired with sense strand, and up to 6 consecutive 3′ terminal nucleotides are unpaired with sense strand, thereby forming a 3′ single stranded overhang of 1-6 nucleotides; wherein the 5′ terminus of antisense strand comprises from 10-30 consecutive nucleotides which are unpaired with sense strand, thereby forming a 10-30 nucleotide single stranded 5′ overhang; wherein at least the sense strand 5′ terminal and 3′ terminal nucleotides are base paired with nucleotides of antisense strand when sense and antisense strands are aligned for maximum complementarity, thereby forming a substantially duplexed region between sense and antisense strands; and antisense strand is sufficiently complementary to a target RNA along at least 19 ribonucleotides of antisense strand length to reduce target gene expression when said double stranded nucleic acid is introduced into a mammalian cell; and wherein the antisense strand contains at least one thermally destabilizing nucleotide, where at least one thermally destabilizing nucleotide is in the seed region of the antisense strand (i.e. at position 2-9 of the 5′-end of the antisense strand). For example, the thermally destabilizing nucleotide occurs between positions opposite or complementary to positions 14-17 of the 5′-end of the sense strand, and wherein the dsRNA optionally further has at least one (e.g., one, two, three, four, five, six or all seven) of the following characteristics: (i) the antisense comprises 2, 3, 4, 5, or 6 2′-fluoro modifications; (ii) the antisense comprises 1, 2, 3, 4, or 5 phosphorothioate internucleotide linkages; (iii) the sense strand is conjugated with a ligand; (iv) the sense strand comprises 2, 3, 4, or 5 2′-fluoro modifications; (v) the sense strand comprises 1, 2, 3, 4, or 5 phosphorothioate internucleotide linkages; and (vi) the dsRNA comprises at least four 2′-fluoro modifications; and (vii) the dsRNA comprises a duplex region of 12-30 nucleotide pairs in length.

[0389] In some embodiments, the dsRNA molecule of the disclosure comprises a sense and antisense strands, wherein said dsRNA molecule comprises a sense strand having a length which is at least 25 and at most 29 nucleotides and an antisense strand having a length which is at most 30 nucleotides with the sense strand comprises a modified nucleotide that is susceptible to enzymatic degradation at position 11 from the 5′ end, wherein the 3′ end of said sense strand and the 5′ end of said antisense strand form a blunt end and said antisense strand is 1-4 nucleotides longer at its 3′ end than the sense strand, wherein the duplex region which is at least 25 nucleotides in length, and said antisense strand is sufficiently complementary to a target mRNA along at least 19 nt of said antisense strand length to reduce target gene expression when said dsRNA molecule is introduced into a mammalian cell, and wherein dicer cleavage of said dsRNA preferentially results in an siRNA comprising said 3′ end of said antisense strand, thereby reducing expression of the target gene in the mammal, wherein the antisense strand contains at least one thermally destabilizing nucleotide, where the at least one thermally destabilizing nucleotide is in the seed region of the antisense strand (i.e. at position 2-9 of the 5′-end of the antisense strand), and wherein the dsRNA optionally further has at least one (e.g., one, two, three, four, five, six or all seven) of the following characteristics: (i) the antisense comprises 2, 3, 4, 5, or 6 2′-fluoro modifications; (ii) the antisense comprises 1, 2, 3, 4, or 5 phosphorothioate internucleotide linkages; (iii) the sense strand is conjugated with a ligand; (iv) the sense strand comprises 2, 3, 4, or 5 2′-fluoro modifications; (v) the sense strand comprises 1, 2, 3, 4, or 5 phosphorothioate internucleotide linkages; and (vi) the dsRNA comprises at least four 2′-fluoro modifications; and (vii) the dsRNA has a duplex region of 12-29 nucleotide pairs in length.

[0390] In some embodiments, every nucleotide in the sense strand and antisense strand of the dsRNA molecule may be modified. Each nucleotide may be modified with the same or different modification which can include one or more alteration of one or both of the non-linking phosphate oxygens or of one or more of the linking phosphate oxygens; alteration of a constituent of the ribose sugar, e.g., of the 2′ hydroxyl on the ribose sugar; wholesale replacement of the phosphate moiety with “dephospho” linkers; modification or replacement of a naturally occurring base; and replacement or modification of the ribose-phosphate backbone.

[0391] As nucleic acids are polymers of subunits, many of the modifications occur at a position which is repeated within a nucleic acid, e.g., a modification of a base, or a phosphate moiety, or a non-linking O of a phosphate moiety. In some cases, the modification will occur at all of the subject positions in the nucleic acid but in many cases it will not. By way of example, a modification may only occur at a 3′ or 5′ terminal position, may only occur in a terminal region, e.g., at a position on a terminal nucleotide or in the last 2, 3, 4, 5, or 10 nucleotides of a strand. A modification may occur in a double strand region, a single strand region, or in both. A modification may occur only in the double strand region of an RNA or may only occur in a single strand region of an RNA. E.g., a phosphorothioate modification at a non-linking O position may only occur at one or both termini, may only occur in a terminal region, e.g., at a position on a terminal nucleotide or in the last 2, 3, 4, 5, or 10 nucleotides of a strand, or may occur in double strand and single strand regions, particularly at termini. The 5′ end or ends can be phosphorylated.

[0392] It may be possible, e.g., to enhance stability, to include particular bases in overhangs, or to include modified nucleotides or nucleotide surrogates, in single strand overhangs, e.g., in a 5′ or 3′ overhang, or in both. E.g., it can be desirable to include purine nucleotides in overhangs. In some embodiments all or some of the bases in a 3′ or 5′ overhang may be modified, e.g., with a modification described herein. Modifications can include, e.g., the use of modifications at the 2′ position of the ribose sugar with modifications that are known in the art, e.g., the use of deoxyribonucleotides, 2′-deoxy-2′-fluoro (2′-F) or 2′-O-methyl modified instead of the ribosugar of the nucleobase, and modifications in the phosphate group, e.g., phosphorothioate modifications. Overhangs need not be homologous with the target sequence.

[0393] In some embodiments, each residue of the sense strand and antisense strand is independently modified with LNA, HNA, CeNA, 2′-methoxyethyl, 2′-O-methyl, 2′-O-allyl, 2′-C-allyl, 2′-deoxy, or 2′-fluoro. The strands can contain more than one modification. In some embodiments, each residue of the sense strand and antisense strand is independently modified with 2′-O-methyl or 2′-fluoro. It is to be understood that these modifications are in addition to the at least one thermally destabilizing modification of the duplex present in the antisense strand.

[0394] At least two different modifications are typically present on the sense strand and antisense strand. Those two modifications may be the 2′-deoxy, 2′-O-methyl or 2′-fluoro modifications, acyclic nucleotides or others. In some embodiments, the sense strand and antisense strand each comprises two differently modified nucleotides selected from 2′-O-methyl or 2′-deoxy. In some embodiments, each residue of the sense strand and antisense strand is independently modified with 2′-O-methyl nucleotide, 2′-deoxy nucleotide, 2′-deoxy-2′-fluoro nucleotide, 2′-O—N-methylacetamido (2′-O-NMA) nucleotide, a 2′-O-dimethylaminoethoxyethyl (2′-O-DMAEOE) nucleotide, 2′-O-aminopropyl (2′-O-AP) nucleotide, or 2′-ara-F nucleotide. Again, it is to be understood that these modifications are in addition to the at least one thermally destabilizing modification of the duplex present in the antisense strand.

[0395] In some embodiments, the dsRNA molecule of the disclosure comprises modifications of an alternating pattern, particular in the B1, B2, B3, B1′, B2′, B3, B4′ regions. The term “alternating motif” or “alternative pattern” as used herein refers to a motif having one or more modifications, each modification occurring on alternating nucleotides of one strand. The alternating nucleotide may refer to one per every other nucleotide or one per every three nucleotides, or a similar pattern. For example, if A, B and C each represent one type of modification to the nucleotide, the alternating motif can be

“ABABABABABAB...,”
“AABBAABBAABB...,”
“AABAABAABAAB...,”
“AAABAAABAAAB...,”
“AAABBBAAABBB...,”
or
“ABCABCABCABC...,” etc.

The type of modifications contained in the alternating motif may be the same or different. For example, if A, B, C, D each represent one type of modification on the nucleotide, the alternating pattern, i.e., modifications on every other nucleotide, may be the same, but each of the sense strand or antisense strand can be selected from several possibilities of modifications within the alternating motif such as “ABABAB . . . ”, “ACACAC . . . ” “BDBDBD . . . ” or “CDCDCD . . . ,” etc.

[0396] In some embodiments, the dsRNA molecule of the disclosure comprises the modification pattern for the alternating motif on the sense strand relative to the modification pattern for the alternating motif on the antisense strand is shifted. The shift may be such that the modified group of nucleotides of the sense strand corresponds to a differently modified group of nucleotides of the antisense strand and vice versa. For example, the sense strand when paired with the antisense strand in the dsRNA duplex, the alternating motif in the sense strand may start with “ABABAB” from 5′-3′ of the strand and the alternating motif in the antisense strand may start with “BABABA” from 3′-5′ of the strand within the duplex region. As another example, the alternating motif in the sense strand may start with “AABBAABB” from 5′-3′ of the strand and the alternating motif in the antisense strand may start with “BBAABBAA” from 3′-5′ of the strand within the duplex region, so that there is a complete or partial shift of the modification patterns between the sense strand and the antisense strand.

[0397] The dsRNA molecule of the disclosure may further comprise at least one phosphorothioate or methylphosphonate internucleotide linkage. The phosphorothioate or methylphosphonate internucleotide linkage modification may occur on any nucleotide of the sense strand or antisense strand or both in any position of the strand. For instance, the internucleotide linkage modification may occur on every nucleotide on the sense strand or antisense strand; each internucleotide linkage modification may occur in an alternating pattern on the sense strand or antisense strand; or the sense strand or antisense strand comprises both internucleotide linkage modifications in an alternating pattern. The alternating pattern of the internucleotide linkage modification on the sense strand may be the same or different from the antisense strand, and the alternating pattern of the internucleotide linkage modification on the sense strand may have a shift relative to the alternating pattern of the internucleotide linkage modification on the antisense strand.

[0398] In some embodiments, the dsRNA molecule comprises the phosphorothioate or methylphosphonate internucleotide linkage modification in the overhang region. For example, the overhang region comprises two nucleotides having a phosphorothioate or methylphosphonate internucleotide linkage between the two nucleotides. Internucleotide linkage modifications also may be made to link the overhang nucleotides with the terminal paired nucleotides within duplex region. For example, at least 2, 3, 4, or all the overhang nucleotides may be linked through phosphorothioate or methylphosphonate internucleotide linkage, and optionally, there may be additional phosphorothioate or methylphosphonate internucleotide linkages linking the overhang nucleotide with a paired nucleotide that is next to the overhang nucleotide. For instance, there may be at least two phosphorothioate internucleotide linkages between the terminal three nucleotides, in which two of the three nucleotides are overhang nucleotides, and the third is a paired nucleotide next to the overhang nucleotide. Preferably, these terminal three nucleotides may be at the 3′-end of the antisense strand.

[0399] In some embodiments, the sense strand of the dsRNA molecule comprises 1-10 blocks of two to ten phosphorothioate or methylphosphonate internucleotide linkages separated by 1, 2, 3, 4, 5, 6, 7, 8, 9, 10, 11, 12, 13, 14, 15, or 16 phosphate internucleotide linkages, wherein one of the phosphorothioate or methylphosphonate internucleotide linkages is placed at any position in the oligonucleotide sequence and the said sense strand is paired with an antisense strand comprising any combination of phosphorothioate, methylphosphonate and phosphate internucleotide linkages or an antisense strand comprising either phosphorothioate or methylphosphonate or phosphate linkage.

[0400] In some embodiments, the antisense strand of the dsRNA molecule comprises two blocks of two phosphorothioate or methylphosphonate internucleotide linkages separated by 1, 2, 3, 4, 5, 6, 7, 8, 9, 10, 11, 12, 13, 14, 15, 16, 17, or 18 phosphate internucleotide linkages, wherein one of the phosphorothioate or methylphosphonate internucleotide linkages is placed at any position in the oligonucleotide sequence and the said antisense strand is paired with a sense strand comprising any combination of phosphorothioate, methylphosphonate and phosphate internucleotide linkages or an antisense strand comprising either phosphorothioate or methylphosphonate or phosphate linkage.

[0401] In some embodiments, the antisense strand of the dsRNA molecule comprises two blocks of three phosphorothioate or methylphosphonate internucleotide linkages separated by 1, 2, 3, 4, 5, 6, 7, 8, 9, 10, 11, 12, 13, 14, 15, or 16 phosphate internucleotide linkages, wherein one of the phosphorothioate or methylphosphonate internucleotide linkages is placed at any position in the oligonucleotide sequence and the said antisense strand is paired with a sense strand comprising any combination of phosphorothioate, methylphosphonate and phosphate internucleotide linkages or an antisense strand comprising either phosphorothioate or methylphosphonate or phosphate linkage.

[0402] In some embodiments, the antisense strand of the dsRNA molecule comprises two blocks of four phosphorothioate or methylphosphonate internucleotide linkages separated by 1, 2, 3, 4, 5, 6, 7, 8, 9, 10, 11, 12, 13, or 14 phosphate internucleotide linkages, wherein one of the phosphorothioate or methylphosphonate internucleotide linkages is placed at any position in the oligonucleotide sequence and the said antisense strand is paired with a sense strand comprising any combination of phosphorothioate, methylphosphonate and phosphate internucleotide linkages or an antisense strand comprising either phosphorothioate or methylphosphonate or phosphate linkage.

[0403] In some embodiments, the antisense strand of the dsRNA molecule comprises two blocks of five phosphorothioate or methylphosphonate internucleotide linkages separated by 1, 2, 3, 4, 5, 6, 7, 8, 9, 10, 11, or 12 phosphate internucleotide linkages, wherein one of the phosphorothioate or methylphosphonate internucleotide linkages is placed at any position in the oligonucleotide sequence and the said antisense strand is paired with a sense strand comprising any combination of phosphorothioate, methylphosphonate and phosphate internucleotide linkages or an antisense strand comprising either phosphorothioate or methylphosphonate or phosphate linkage.

[0404] In some embodiments, the antisense strand of the dsRNA molecule comprises two blocks of six phosphorothioate or methylphosphonate internucleotide linkages separated by 1, 2, 3, 4, 5, 6, 7, 8, 9, or 10 phosphate internucleotide linkages, wherein one of the phosphorothioate or methylphosphonate internucleotide linkages is placed at any position in the oligonucleotide sequence and the said antisense strand is paired with a sense strand comprising any combination of phosphorothioate, methylphosphonate and phosphate internucleotide linkages or an antisense strand comprising either phosphorothioate or methylphosphonate or phosphate linkage.

[0405] In some embodiments, the antisense strand of the dsRNA molecule comprises two blocks of seven phosphorothioate or methylphosphonate internucleotide linkages separated by 1, 2, 3, 4, 5, 6, 7, or 8 phosphate internucleotide linkages, wherein one of the phosphorothioate or methylphosphonate internucleotide linkages is placed at any position in the oligonucleotide sequence and the said antisense strand is paired with a sense strand comprising any combination of phosphorothioate, methylphosphonate and phosphate internucleotide linkages or an antisense strand comprising either phosphorothioate or methylphosphonate or phosphate linkage.

[0406] In some embodiments, the antisense strand of the dsRNA molecule comprises two blocks of eight phosphorothioate or methylphosphonate internucleotide linkages separated by 1, 2, 3, 4, 5, or 6 phosphate internucleotide linkages, wherein one of the phosphorothioate or methylphosphonate internucleotide linkages is placed at any position in the oligonucleotide sequence and the said antisense strand is paired with a sense strand comprising any combination of phosphorothioate, methylphosphonate and phosphate internucleotide linkages or an antisense strand comprising either phosphorothioate or methylphosphonate or phosphate linkage.

[0407] In some embodiments, the antisense strand of the dsRNA molecule comprises two blocks of nine phosphorothioate or methylphosphonate internucleotide linkages separated by 1, 2, 3, or 4 phosphate internucleotide linkages, wherein one of the phosphorothioate or methylphosphonate internucleotide linkages is placed at any position in the oligonucleotide sequence and the said antisense strand is paired with a sense strand comprising any combination of phosphorothioate, methylphosphonate and phosphate internucleotide linkages or an antisense strand comprising either phosphorothioate or methylphosphonate or phosphate linkage.

[0408] In some embodiments, the dsRNA molecule of the disclosure further comprises one or more phosphorothioate or methylphosphonate internucleotide linkage modification within 1-10 of the termini position(s) of the sense or antisense strand. For example, at least 2, 3, 4, 5, 6, 7, 8, 9, or 10 nucleotides may be linked through phosphorothioate or methylphosphonate internucleotide linkage at one end or both ends of the sense or antisense strand.

[0409] In some embodiments, the dsRNA molecule of the disclosure further comprises one or more phosphorothioate or methylphosphonate internucleotide linkage modification within 1-10 of the internal region of the duplex of each of the sense or antisense strand. For example, at least 2, 3, 4, 5, 6, 7, 8, 9, or 10 nucleotides may be linked through phosphorothioate methylphosphonate internucleotide linkage at position 8-16 of the duplex region counting from the 5′-end of the sense strand; the dsRNA molecule can optionally further comprise one or more phosphorothioate or methylphosphonate internucleotide linkage modification within 1-10 of the termini position(s).

[0410] In some embodiments, the dsRNA molecule of the disclosure further comprises one to five phosphorothioate or methylphosphonate internucleotide linkage modification(s) within position 1-5 and one to five phosphorothioate or methylphosphonate internucleotide linkage modification(s) within position 18-23 of the sense strand (counting from the 5′-end), and one to five phosphorothioate or methylphosphonate internucleotide linkage modification at positions 1 and 2 and one to five within positions 18-23 of the antisense strand (counting from the 5′-end).

[0411] In some embodiments, the dsRNA molecule of the disclosure further comprises one phosphorothioate internucleotide linkage modification within position 1-5 and one phosphorothioate or methylphosphonate internucleotide linkage modification within position 18-23 of the sense strand (counting from the 5′-end), and one phosphorothioate internucleotide linkage modification at positions 1 and 2 and two phosphorothioate or methylphosphonate internucleotide linkage modifications within positions 18-23 of the antisense strand (counting from the 5′-end).

[0412] In some embodiments, the dsRNA molecule of the disclosure further comprises two phosphorothioate internucleotide linkage modifications within position 1-5 and one phosphorothioate internucleotide linkage modification within position 18-23 of the sense strand (counting from the 5′-end), and one phosphorothioate internucleotide linkage modification at positions 1 and 2 and two phosphorothioate internucleotide linkage modifications within positions 18-23 of the antisense strand (counting from the 5′-end).

[0413] In some embodiments, the dsRNA molecule of the disclosure further comprises two phosphorothioate internucleotide linkage modifications within position 1-5 and two phosphorothioate internucleotide linkage modifications within position 18-23 of the sense strand (counting from the 5′-end), and one phosphorothioate internucleotide linkage modification at positions 1 and 2 and two phosphorothioate internucleotide linkage modifications within positions 18-23 of the antisense strand (counting from the 5′-end).

[0414] In some embodiments, the dsRNA molecule of the disclosure further comprises two phosphorothioate internucleotide linkage modifications within position 1-5 and two phosphorothioate internucleotide linkage modifications within position 18-23 of the sense strand (counting from the 5′-end), and one phosphorothioate internucleotide linkage modification at positions 1 and 2 and one phosphorothioate internucleotide linkage modification within positions 18-23 of the antisense strand (counting from the 5′-end).

[0415] In some embodiments, the dsRNA molecule of the disclosure further comprises one phosphorothioate internucleotide linkage modification within position 1-5 and one phosphorothioate internucleotide linkage modification within position 18-23 of the sense strand (counting from the 5′-end), and two phosphorothioate internucleotide linkage modifications at positions 1 and 2 and two phosphorothioate internucleotide linkage modifications within positions 18-23 of the antisense strand (counting from the 5′-end).

[0416] In some embodiments, the dsRNA molecule of the disclosure further comprises one phosphorothioate internucleotide linkage modification within position 1-5 and one within position 18-23 of the sense strand (counting from the 5′-end), and two phosphorothioate internucleotide linkage modification at positions 1 and 2 and one phosphorothioate internucleotide linkage modification within positions 18-23 of the antisense strand (counting from the 5′-end).

[0417] In some embodiments, the dsRNA molecule of the disclosure further comprises one phosphorothioate internucleotide linkage modification within position 1-5 (counting from the 5′-end) of the sense strand, and two phosphorothioate internucleotide linkage modifications at positions 1 and 2 and one phosphorothioate internucleotide linkage modification within positions 18-23 of the antisense strand (counting from the 5′-end).

[0418] In some embodiments, the dsRNA molecule of the disclosure further comprises two phosphorothioate internucleotide linkage modifications within position 1-5 (counting from the 5′-end) of the sense strand, and one phosphorothioate internucleotide linkage modification at positions 1 and 2 and two phosphorothioate internucleotide linkage modifications within positions 18-23 of the antisense strand (counting from the 5′-end).

[0419] In some embodiments, the dsRNA molecule of the disclosure further comprises two phosphorothioate internucleotide linkage modifications within position 1-5 and one within position 18-23 of the sense strand (counting from the 5′-end), and two phosphorothioate internucleotide linkage modifications at positions 1 and 2 and one phosphorothioate internucleotide linkage modification within positions 18-23 of the antisense strand (counting from the 5′-end).

[0420] In some embodiments, the dsRNA molecule of the disclosure further comprises two phosphorothioate internucleotide linkage modifications within position 1-5 and one phosphorothioate internucleotide linkage modification within position 18-23 of the sense strand (counting from the 5′-end), and two phosphorothioate internucleotide linkage modifications at positions 1 and 2 and two phosphorothioate internucleotide linkage modifications within positions 18-23 of the antisense strand (counting from the 5′-end).

[0421] In some embodiments, the dsRNA molecule of the disclosure further comprises two phosphorothioate internucleotide linkage modifications within position 1-5 and one phosphorothioate internucleotide linkage modification within position 18-23 of the sense strand (counting from the 5′-end), and one phosphorothioate internucleotide linkage modification at positions 1 and 2 and two phosphorothioate internucleotide linkage modifications within positions 18-23 of the antisense strand (counting from the 5′-end).

[0422] In some embodiments, the dsRNA molecule of the disclosure further comprises two phosphorothioate internucleotide linkage modifications at position 1 and 2, and two phosphorothioate internucleotide linkage modifications at position 20 and 21 of the sense strand (counting from the 5′-end), and one phosphorothioate internucleotide linkage modification at positions 1 and one at position 21 of the antisense strand (counting from the 5′-end).

[0423] In some embodiments, the dsRNA molecule of the disclosure further comprises one phosphorothioate internucleotide linkage modification at position 1, and one phosphorothioate internucleotide linkage modification at position 21 of the sense strand (counting from the 5′-end), and two phosphorothioate internucleotide linkage modifications at positions 1 and 2 and two phosphorothioate internucleotide linkage modifications at positions 20 and 21 the antisense strand (counting from the 5′-end).

[0424] In some embodiments, the dsRNA molecule of the disclosure further comprises two phosphorothioate internucleotide linkage modifications at position 1 and 2, and two phosphorothioate internucleotide linkage modifications at position 21 and 22 of the sense strand (counting from the 5′-end), and one phosphorothioate internucleotide linkage modification at positions 1 and one phosphorothioate internucleotide linkage modification at position 21 of the antisense strand (counting from the 5′-end).

[0425] In some embodiments, the dsRNA molecule of the disclosure further comprises one phosphorothioate internucleotide linkage modification at position 1, and one phosphorothioate internucleotide linkage modification at position 21 of the sense strand (counting from the 5′-end), and two phosphorothioate internucleotide linkage modifications at positions 1 and 2 and two phosphorothioate internucleotide linkage modifications at positions 21 and 22 the antisense strand (counting from the 5′-end).

[0426] In some embodiments, the dsRNA molecule of the disclosure further comprises two phosphorothioate internucleotide linkage modifications at position 1 and 2, and two phosphorothioate internucleotide linkage modifications at position 22 and 23 of the sense strand (counting from the 5′-end), and one phosphorothioate internucleotide linkage modification at positions 1 and one phosphorothioate internucleotide linkage modification at position 21 of the antisense strand (counting from the 5′-end).

[0427] In some embodiments, the dsRNA molecule of the disclosure further comprises one phosphorothioate internucleotide linkage modification at position 1, and one phosphorothioate internucleotide linkage modification at position 21 of the sense strand (counting from the 5′-end), and two phosphorothioate internucleotide linkage modifications at positions 1 and 2 and two phosphorothioate internucleotide linkage modifications at positions 23 and 23 the antisense strand (counting from the 5′-end).

[0428] In some embodiments, compound of the disclosure comprises a pattern of backbone chiral centers. In some embodiments, a common pattern of backbone chiral centers comprises at least 5 internucleotidic linkages in the Sp configuration. In some embodiments, a common pattern of backbone chiral centers comprises at least 6 internucleotidic linkages in the Sp configuration. In some embodiments, a common pattern of backbone chiral centers comprises at least 7 internucleotidic linkages in the Sp configuration. In some embodiments, a common pattern of backbone chiral centers comprises at least 8 internucleotidic linkages in the Sp configuration. In some embodiments, a common pattern of backbone chiral centers comprises at least 9 internucleotidic linkages in the Sp configuration.

[0429] In some embodiments, a common pattern of backbone chiral centers comprises at least 10 internucleotidic linkages in the Sp configuration. In some embodiments, a common pattern of backbone chiral centers comprises at least 11 internucleotidic linkages in the Sp configuration. In some embodiments, a common pattern of backbone chiral centers comprises at least 12 internucleotidic linkages in the Sp configuration. In some embodiments, a common pattern of backbone chiral centers comprises at least 13 internucleotidic linkages in the Sp configuration. In some embodiments, a common pattern of backbone chiral centers comprises at least 14 internucleotidic linkages in the Sp configuration. In some embodiments, a common pattern of backbone chiral centers comprises at least 15 internucleotidic linkages in the Sp configuration. In some embodiments, a common pattern of backbone chiral centers comprises at least 16 internucleotidic linkages in the Sp configuration. In some embodiments, a common pattern of backbone chiral centers comprises at least 17 internucleotidic linkages in the Sp configuration. In some embodiments, a common pattern of backbone chiral centers comprises at least 18 internucleotidic linkages in the Sp configuration. In some embodiments, a common pattern of backbone chiral centers comprises at least 19 internucleotidic linkages in the Sp configuration. In some embodiments, a common pattern of backbone chiral centers comprises no more than 8 internucleotidic linkages in the Rp configuration. In some embodiments, a common pattern of backbone chiral centers comprises no more than 7 internucleotidic linkages in the Rp configuration. In some embodiments, a common pattern of backbone chiral centers comprises no more than 6 internucleotidic linkages in the Rp configuration. In some embodiments, a common pattern of backbone chiral centers comprises no more than 5 internucleotidic linkages in the Rp configuration. In some embodiments, a common pattern of backbone chiral centers comprises no more than 4 internucleotidic linkages in the Rp configuration. In some embodiments, a common pattern of backbone chiral centers comprises no more than 3 internucleotidic linkages in the Rp configuration. In some embodiments, a common pattern of backbone chiral centers comprises no more than 2 internucleotidic linkages in the Rp configuration. In some embodiments, a common pattern of backbone chiral centers comprises no more than 1 internucleotidic linkages in the Rp configuration. In some embodiments, a common pattern of backbone chiral centers comprises no more than 8 internucleotidic linkages which are not chiral (as a non-limiting example, a phosphodiester). In some embodiments, a common pattern of backbone chiral centers comprises no more than 7 internucleotidic linkages which are not chiral. In some embodiments, a common pattern of backbone chiral centers comprises no more than 6 internucleotidic linkages which are not chiral. In some embodiments, a common pattern of backbone chiral centers comprises no more than 5 internucleotidic linkages which are not chiral. In some embodiments, a common pattern of backbone chiral centers comprises no more than 4 internucleotidic linkages which are not chiral. In some embodiments, a common pattern of backbone chiral centers comprises no more than 3 internucleotidic linkages which are not chiral. In some embodiments, a common pattern of backbone chiral centers comprises no more than 2 internucleotidic linkages which are not chiral. In some embodiments, a common pattern of backbone chiral centers comprises no more than 1 internucleotidic linkages which are not chiral. In some embodiments, a common pattern of backbone chiral centers comprises at least 10 internucleotidic linkages in the Sp configuration, and no more than 8 internucleotidic linkages which are not chiral. In some embodiments, a common pattern of backbone chiral centers comprises at least 11 internucleotidic linkages in the Sp configuration, and no more than 7 internucleotidic linkages which are not chiral. In some embodiments, a common pattern of backbone chiral centers comprises at least 12 internucleotidic linkages in the Sp configuration, and no more than 6 internucleotidic linkages which are not chiral. In some embodiments, a common pattern of backbone chiral centers comprises at least 13 internucleotidic linkages in the Sp configuration, and no more than 6 internucleotidic linkages which are not chiral. In some embodiments, a common pattern of backbone chiral centers comprises at least 14 internucleotidic linkages in the Sp configuration, and no more than 5 internucleotidic linkages which are not chiral. In some embodiments, a common pattern of backbone chiral centers comprises at least 15 internucleotidic linkages in the Sp configuration, and no more than 4 internucleotidic linkages which are not chiral. In some embodiments, the internucleotidic linkages in the Sp configuration are optionally contiguous or not contiguous. In some embodiments, the internucleotidic linkages in the Rp configuration are optionally contiguous or not contiguous. In some embodiments, the internucleotidic linkages which are not chiral are optionally contiguous or not contiguous.

[0430] In some embodiments, compound of the disclosure comprises a block is a stereochemistry block. In some embodiments, a block is an Rp block in that each internucleotidic linkage of the block is Rp. In some embodiments, a 5′-block is an Rp block. In some embodiments, a 3′-block is an Rp block. In some embodiments, a block is an Sp block in that each internucleotidic linkage of the block is Sp. In some embodiments, a 5′-block is an Sp block. In some embodiments, a 3′-block is an Sp block. In some embodiments, provided oligonucleotides comprise both Rp and Sp blocks. In some embodiments, provided oligonucleotides comprise one or more Rp but no Sp blocks. In some embodiments, provided oligonucleotides comprise one or more Sp but no Rp blocks. In some embodiments, provided oligonucleotides comprise one or more PO blocks wherein each internucleotidic linkage in a natural phosphate linkage.

[0431] In some embodiments, compound of the disclosure comprises a 5′-block is an Sp block wherein each sugar moiety comprises a 2′-F modification. In some embodiments, a 5′-block is an Sp block wherein each of internucleotidic linkage is a modified internucleotidic linkage and each sugar moiety comprises a 2′-F modification. In some embodiments, a 5′-block is an Sp block wherein each of internucleotidic linkage is a phosphorothioate linkage and each sugar moiety comprises a 2′-F modification. In some embodiments, a 5′-block comprises 4 or more nucleoside units. In some embodiments, a 5′-block comprises 5 or more nucleoside units. In some embodiments, a 5′-block comprises 6 or more nucleoside units. In some embodiments, a 5′-block comprises 7 or more nucleoside units. In some embodiments, a 3′-block is an Sp block wherein each sugar moiety comprises a 2′-F modification. In some embodiments, a 3′-block is an Sp block wherein each of internucleotidic linkage is a modified internucleotidic linkage and each sugar moiety comprises a 2′-F modification. In some embodiments, a 3′-block is an Sp block wherein each of internucleotidic linkage is a phosphorothioate linkage and each sugar moiety comprises a 2′-F modification. In some embodiments, a 3′-block comprises 4 or more nucleoside units. In some embodiments, a 3′-block comprises 5 or more nucleoside units. In some embodiments, a 3′-block comprises 6 or more nucleoside units. In some embodiments, a 3′-block comprises 7 or more nucleoside units.

[0432] In some embodiments, compound of the disclosure comprises a type of nucleoside in a region or an oligonucleotide is followed by a specific type of internucleotidic linkage, e.g., natural phosphate linkage, modified internucleotidic linkage, Rp chiral internucleotidic linkage, Sp chiral internucleotidic linkage, etc. In some embodiments, A is followed by Sp. In some embodiments, A is followed by Rp. In some embodiments, A is followed by natural phosphate linkage (PO). In some embodiments, U is followed by Sp. In some embodiments, U is followed by Rp. In some embodiments, U is followed by natural phosphate linkage (PO). In some embodiments, C is followed by Sp. In some embodiments, C is followed by Rp. In some embodiments, C is followed by natural phosphate linkage (PO). In some embodiments, G is followed by Sp. In some embodiments, G is followed by Rp. In some embodiments, G is followed by natural phosphate linkage (PO). In some embodiments, C and U are followed by Sp. In some embodiments, C and U are followed by Rp. In some embodiments, C and U are followed by natural phosphate linkage (PO). In some embodiments, A and G are followed by Sp. In some embodiments, A and G are followed by Rp.

[0433] In some embodiments, the antisense strand comprises phosphorothioate internucleotide linkages between nucleotide positions 21 and 22, and between nucleotide positions 22 and 23, wherein the antisense strand contains at least one thermally destabilizing modification of the duplex located in the seed region of the antisense strand (i.e., at position 2-9 of the 5′-end of the antisense strand), and wherein the dsRNA optionally further has at least one (e.g., one, two, three, four, five, six, seven or all eight) of the following characteristics: (i) the antisense comprises 2, 3, 4, 5 or 6 2′-fluoro modifications; (ii) the antisense comprises 3, 4 or 5 phosphorothioate internucleotide linkages; (iii) the sense strand is conjugated with a ligand; (iv) the sense strand comprises 2, 3, 4 or 5 2′-fluoro modifications; (v) the sense strand comprises 1, 2, 3, 4 or 5 phosphorothioate internucleotide linkages; (vi) the dsRNA comprises at least four 2′-fluoro modifications; (vii) the dsRNA comprises a duplex region of 12-40 nucleotide pairs in length; and (viii) the dsRNA has a blunt end at 5′-end of the antisense strand.

[0434] In some embodiments, the antisense strand comprises phosphorothioate internucleotide linkages between nucleotide positions 1 and 2, between nucleotide positions 2 and 3, between nucleotide positions 21 and 22, and between nucleotide positions 22 and 23, wherein the antisense strand contains at least one thermally destabilizing modification of the duplex located in the seed region of the antisense strand (i.e., at position 2-9 of the 5′-end of the antisense strand), and wherein the dsRNA optionally further has at least one (e.g., one, two, three, four, five, six, seven or all eight) of the following characteristics: (i) the antisense comprises 2, 3, 4, 5 or 6 2′-fluoro modifications; (ii) the sense strand is conjugated with a ligand; (iii) the sense strand comprises 2, 3, 4 or 5 2′-fluoro modifications; (iv) the sense strand comprises 1, 2, 3, 4 or 5 phosphorothioate internucleotide linkages; (v) the dsRNA comprises at least four 2′-fluoro modifications; (vi) the dsRNA comprises a duplex region of 12-40 nucleotide pairs in length; (vii) the dsRNA comprises a duplex region of 12-40 nucleotide pairs in length; and (viii) the dsRNA has a blunt end at 5′-end of the antisense strand.

[0435] In some embodiments, the sense strand comprises phosphorothioate internucleotide linkages between nucleotide positions 1 and 2, and between nucleotide positions 2 and 3, wherein the antisense strand contains at least one thermally destabilizing modification of the duplex located in the seed region of the antisense strand (i.e., at position 2-9 of the 5′-end of the antisense strand), and wherein the dsRNA optionally further has at least one (e.g., one, two, three, four, five, six, seven or all eight) of the following characteristics: (i) the antisense comprises 2, 3, 4, 5 or 6 2′-fluoro modifications; (ii) the antisense comprises 1, 2, 3, 4 or 5 phosphorothioate internucleotide linkages; (iii) the sense strand is conjugated with a ligand; (iv) the sense strand comprises 2, 3, 4 or 5 2′-fluoro modifications; (v) the sense strand comprises 3, 4 or 5 phosphorothioate internucleotide linkages; (vi) the dsRNA comprises at least four 2′-fluoro modifications; (vii) the dsRNA comprises a duplex region of 12-40 nucleotide pairs in length; and (viii) the dsRNA has a blunt end at 5′-end of the antisense strand.

[0436] In some embodiments, the sense strand comprises phosphorothioate internucleotide linkages between nucleotide positions 1 and 2, and between nucleotide positions 2 and 3, the antisense strand comprises phosphorothioate internucleotide linkages between nucleotide positions 1 and 2, between nucleotide positions 2 and 3, between nucleotide positions 21 and 22, and between nucleotide positions 22 and 23, wherein the antisense strand contains at least one thermally destabilizing modification of the duplex located in the seed region of the antisense strand (i.e., at position 2-9 of the 5′-end of the antisense strand), and wherein the dsRNA optionally further has at least one (e.g., one, two, three, four, five, six or all seven) of the following characteristics: (i) the antisense comprises 2, 3, 4, 5 or 6 2′-fluoro modifications; (ii) the sense strand is conjugated with a ligand; (iii) the sense strand comprises 2, 3, 4 or 5 2′-fluoro modifications; (iv) the sense strand comprises 3, 4 or 5 phosphorothioate internucleotide linkages; (v) the dsRNA comprises at least four 2′-fluoro modifications; (vi) the dsRNA comprises a duplex region of 12-40 nucleotide pairs in length; and (vii) the dsRNA has a blunt end at 5′-end of the antisense strand.

[0437] In some embodiments, the dsRNA molecule of the disclosure comprises mismatch(es) with the target, within the duplex, or combinations thereof. The mismatch can occur in the overhang region or the duplex region. The base pair can be ranked on the basis of their propensity to promote dissociation or melting (e.g., on the free energy of association or dissociation of a particular pairing, the simplest approach is to examine the pairs on an individual pair basis, though next neighbor or similar analysis can also be used). In terms of promoting dissociation: A:U is preferred over G:C; G:U is preferred over G:C; and I:C is preferred over G:C (I=inosine). Mismatches, e.g., non-canonical or other than canonical pairings (as described elsewhere herein) are preferred over canonical (A:T, A:U, G:C) pairings; and pairings which include a universal base are preferred over canonical pairings.

[0438] In some embodiments, the dsRNA molecule of the disclosure comprises at least one of the first 1, 2, 3, 4, or 5 base pairs within the duplex regions from the 5′-end of the antisense strand can be chosen independently from the group of: A:U, G:U, I:C, and mismatched pairs, e.g., non-canonical or other than canonical pairings or pairings which include a universal base, to promote the dissociation of the antisense strand at the 5′-end of the duplex.

[0439] In some embodiments, the nucleotide at the 1 position within the duplex region from the 5′-end in the antisense strand is selected from the group consisting of A, dA, dU, U, and dT. Alternatively, at least one of the first 1, 2 or 3 base pair within the duplex region from the 5′-end of the antisense strand is an AU base pair. For example, the first base pair within the duplex region from the 5′-end of the antisense strand is an AU base pair.

[0440] It was found that introducing 4′-modified or 5′-modified nucleotide to the 3′-end of a phosphodiester (PO), phosphorothioate (PS), or phosphorodithioate (PS2) linkage of a dinucleotide at any position of single stranded or double stranded oligonucleotide can exert steric effect to the internucleotide linkage and, hence, protecting or stabilizing it against nucleases.

[0441] In some embodiments, 5′-modified nucleoside is introduced at the 3′-end of a dinucleotide at any position of single stranded or double stranded siRNA. For instance, a 5′-alkylated nucleoside may be introduced at the 3′-end of a dinucleotide at any position of single stranded or double stranded siRNA. The alkyl group at the 5′ position of the ribose sugar can be racemic or chirally pure R or 5′ isomer. An exemplary 5′-alkylated nucleoside is 5′-methyl nucleoside. The 5′-methyl can be either racemic or chirally pure R or S isomer.

[0442] In some embodiments, 4′-modified nucleoside is introduced at the 3′-end of a dinucleotide at any position of single stranded or double stranded siRNA. For instance, a 4′-alkylated nucleoside may be introduced at the 3′-end of a dinucleotide at any position of single stranded or double stranded siRNA. The alkyl group at the 4′ position of the ribose sugar can be racemic or chirally pure R or S isomer. An exemplary 4′-alkylated nucleoside is 4′-methyl nucleoside. The 4′-methyl can be either racemic or chirally pure R or S isomer. Alternatively, a 4′-O-alkylated nucleoside may be introduced at the 3′-end of a dinucleotide at any position of single stranded or double stranded siRNA. The 4′-O-alkyl of the ribose sugar can be racemic or chirally pure R or S isomer. An exemplary 4′-O-alkylated nucleoside is 4′-O-methyl nucleoside. The 4′-O-methyl can be either racemic or chirally pure R or S isomer.

[0443] In some embodiments, 5′-alkylated nucleoside is introduced at any position on the sense strand or antisense strand of a dsRNA, and such modification maintains or improves potency of the dsRNA. The 5′-alkyl can be either racemic or chirally pure R or S isomer. An exemplary 5′-alkylated nucleoside is 5′-methyl nucleoside. The 5′-methyl can be either racemic or chirally pure R or S isomer.

[0444] In some embodiments, 4′-alkylated nucleoside is introduced at any position on the sense strand or antisense strand of a dsRNA, and such modification maintains or improves potency of the dsRNA. The 4′-alkyl can be either racemic or chirally pure R or S isomer. An exemplary 4′-alkylated nucleoside is 4′-methyl nucleoside. The 4′-methyl can be either racemic or chirally pure R or S isomer.

[0445] In some embodiments, 4′-O-alkylated nucleoside is introduced at any position on the sense strand or antisense strand of a dsRNA, and such modification maintains or improves potency of the dsRNA. The 5′-alkyl can be either racemic or chirally pure R or S isomer. An exemplary 4′-O-alkylated nucleoside is 4′-O-methyl nucleoside. The 4′-O-methyl can be either racemic or chirally pure R or S isomer.

[0446] In some embodiments, the dsRNA molecule of the disclosure can comprise 2′-5′ linkages (with 2′-H, 2′-OH and 2′-OMe and with P═O or P═S). For example, the 2′-5′ linkages modifications can be used to promote nuclease resistance or to inhibit binding of the sense to the antisense strand, or can be used at the 5′ end of the sense strand to avoid sense strand activation by RISC.

[0447] In another embodiment, the dsRNA molecule of the disclosure can comprise L sugars (e.g., L ribose, L-arabinose with 2′-H, 2′-OH and 2′-OMe). For example, these L sugars modifications can be used to promote nuclease resistance or to inhibit binding of the sense to the antisense strand, or can be used at the 5′ end of the sense strand to avoid sense strand activation by RISC.

[0448] Various publications describe multimeric siRNA which can all be used with the dsRNA of the disclosure. Such publications include WO2007/091269, U.S. Pat. No. 7,858,769, WO2010/141511, WO2007/117686, WO2009/014887, and WO2011/031520 which are hereby incorporated by their entirely.

[0449] As described in more detail below, the RNAi agent that contains conjugations of one or more carbohydrate moieties to an RNAi agent may improve one or more properties of the RNAi agent. In many cases, the carbohydrate moiety will be attached to a modified subunit of the RNAi agent. For example, the ribose sugar of one or more ribonucleotide subunits of a dsRNA agent can be replaced with another moiety, e.g., a non-carbohydrate (preferably cyclic) carrier to which is attached a carbohydrate ligand. A ribonucleotide subunit in which the ribose sugar of the subunit has been so replaced is referred to herein as a ribose replacement modification subunit (RRMS). A cyclic carrier may be a carbocyclic ring system, i.e., all ring atoms are carbon atoms, or a heterocyclic ring system, i.e., one or more ring atoms may be a heteroatom, e.g., nitrogen, oxy gen, sulfur. The cyclic carrier may be a monocyclic ring system, or may contain two or more rings, e.g. fused rings. The cyclic carrier may be a fully saturated ring system, or it may contain one or more double bonds.

[0450] The ligand may be attached to the polynucleotide via a carrier. The carriers include (i) at least one “backbone attachment point,” preferably two “backbone attachment points” and (ii) at least one “tethering attachment point.” A “backbone attachment point” as used herein refers to a functional group, e.g. a hydroxyl group, or generally, a bond available for, and that is suitable for incorporation of the carrier into the backbone, e.g., the phosphate, or modified phosphate, e.g., sulfur containing, backbone, of a ribonucleic acid. A “tethering attachment point” (TAP) in some embodiments refers to a constituent ring atom of the cyclic carrier, e.g., a carbon atom or a heteroatom (distinct from an atom which provides a backbone attachment point), that connects a selected moiety. The moiety can be, e.g., a carbohydrate, e.g. monosaccharide, disaccharide, trisaccharide, tetrasaccharide, oligosaccharide and polysaccharide. Optionally, the selected moiety is connected by an intervening tether to the cyclic carrier. Thus, the cyclic carrier will often include a functional group, e.g., an amino group, or generally, provide a bond, that is suitable for incorporation or tethering of another chemical entity, e.g., a ligand to the constituent ring.

[0451] The RNAi agents may be conjugated to a ligand via a carrier, wherein the carrier can be cyclic group or acyclic group. The cyclic group can be selected from pyrrolidinyl, pyrazolinyl, pyrazolidinyl, imidazolinyl, imidazolidinyl, piperidinyl, piperazinyl, [1,3]dioxolane, oxazolidinyl, isoxazolidinyl, morpholinyl, thiazolidinyl, isothiazolidinyl, quinoxalinyl, pyridazinonyl, tetrahydrofuryl and and decalinyl. The acyclic group can be a serinol backbone or diethanolamine backbone.

[0452] In certain specific embodiments, the RNAi agent for use in the methods of the disclosure is an agent selected from the group of agents listed in Tables 3 or 4. These agents may further comprise a ligand.

IV. iRNAs Conjugated to Ligands

[0453] Another modification of the RNA of an iRNA of the invention involves chemically linking to the iRNA one or more ligands, moieties or conjugates that enhance the activity, cellular distribution or cellular uptake of the iRNA, e.g., into a cell. Such moieties include but are not limited to lipid moieties such as a cholesterol moiety (Letsinger et al., Proc. Natl. Acid. Sci. USA, 1989, 86: 6553-6556), cholic acid (Manoharan et al., Biorg. Med. Chem. Let., 1994, 4:1053-1060), a thioether, e.g., beryl-S-tritylthiol (Manoharan et al., Ann. N.Y. Acad. Sci., 1992, 660:306-309; Manoharan et al., Biorg. Med. Chem. Let., 1993, 3:2765-2770), a thiocholesterol (Oberhauser et al., Nucl. Acids Res., 1992, 20:533-538), an aliphatic chain, e.g., dodecandiol or undecyl residues (Saison-Behmoaras et al., EMBO J, 1991, 10:1111-1118; Kabanov et al., FEBS Lett., 1990, 259:327-330; Svinarchuk et al., Biochimie, 1993, 75:49-54), a phospholipid, e.g., di-hexadecyl-rac-glycerol or triethyl-ammonium 1,2-di-G-hexadecyl-rac-glycero-3-phosphonate (Manoharan et al., Tetrahedron Lett., 1995, 36:3651-3654; Shea et al., Nucl. Acids Res., 1990, 18:3777-3783), a polyamine or a polyethylene glycol chain (Manoharan et al., Nucleosides & Nucleotides, 1995, 14:969-973), or adamantane acetic acid (Manoharan et al., Tetrahedron Lett., 1995, 36:3651-3654), a palmityl moiety (Mishra et al., Biochim. Biophys. Acta, 1995, 1264:229-237), or an octadecylamine or hexylamino-carbonyloxycholesterol moiety (Crooke et al., J. Pharmacol. Exp. Ther., 1996, 277:923-937).

[0454] In certain embodiments, a ligand alters the distribution, targeting or lifetime of an iRNA agent into which it is incorporated. In some embodiments, a ligand provides an enhanced affinity for a selected target, e.g., molecule, cell or cell type, compartment, e.g., a cellular or organ compartment, tissue, organ or region of the body, as, e.g., compared to a species absent such a ligand. Typical ligands will not take part in duplex pairing in a duplexed nucleic acid.

[0455] Ligands can include a naturally occurring substance, such as a protein (e.g., human serum albumin (HSA), low-density lipoprotein (LDL), or globulin); carbohydrate (e.g., a dextran, pullulan, chitin, chitosan, inulin, cyclodextrin or hyaluronic acid); or a lipid. The ligand may also be a recombinant or synthetic molecule, such as a synthetic polymer, e.g., a synthetic polyamino acid. Examples of polyamino acids include polyamino acid is a polylysine (PLL), poly L-aspartic acid, poly L-glutamic acid, styrene-maleic acid anhydride copolymer, poly(L-lactide-co-glycolied) copolymer, divinyl ether-maleic anhydride copolymer, N-(2-hydroxypropyl)methacrylamide copolymer (HMPA), polyethylene glycol (PEG), poly vinyl alcohol (PVA), polyurethane, poly(2-ethylacryllic acid), N-isopropylacrylanide polymers, or polyphosphazine. Example of polyamines include: polyethylenimine, polylysine (PLL), spermine, spermidine, polyamine, pseudopeptide-polyamine, peptidomimetic polyamine, dendrimer polyamine, arginine, amidine, protamine, cationic lipid, cationic porphyrin, quaternary salt of a polyamine, or an α helical peptide.

[0456] Ligands can also include targeting groups, e.g., a cell or tissue targeting agent, e.g., a lectin, glycoprotein, lipid or protein, e.g., an antibody, that binds to a specified cell type such as a kidney cell. A targeting group can be a thyrotropin, melanotropin, lectin, glycoprotein, surfactant protein A, Mucin carbohydrate, multivalent lactose, multivalent galactose, N-acetyl-galactosamine, N-acetyl-glucosamine multivalent mannose, multivalent fucose, glycosylated polyaminoacids, multivalent galactose, transferrin, bisphosphonate, polyglutamate, polyaspartate, a lipid, cholesterol, a steroid, bile acid, folate, vitamin B12, biotin, or an RGD peptide or RGD peptide mimetic. In certain embodiments, the ligand is a multivalent galactose, e.g., an N-acetyl-galactosamine.

[0457] Other examples of ligands include dyes, intercalating agents (e.g. acridines), cross-linkers (e.g. psoralene, mitomycin C), porphyrins (TPPC4, texaphyrin, Sapphyrin), polycyclic aromatic hydrocarbons (e.g., phenazine, dihydrophenazine), artificial endonucleases (e.g. EDTA), lipophilic molecules, e.g., cholesterol, cholic acid, adamantane acetic acid, 1-pyrene butyric acid, dihydrotestosterone, 1,3-Bis-O(hexadecyl)glycerol, geranyloxyhexyl group, hexadecylglycerol, borneol, menthol, 1,3-propanediol, heptadecyl group, palmitic acid, myristic acid, O3-(oleoyl)lithocholic acid, O3-(oleoyl)cholenic acid, dimethoxytrityl, or phenoxazine) and peptide conjugates (e.g., antennapedia peptide, Tat peptide), alkylating agents, phosphate, amino, mercapto, PEG (e.g., PEG-40K), mPEG, [mPEG]₂, polyamino, alkyl, substituted alkyl, radiolabeled markers, enzymes, haptens (e.g. biotin), transport/absorption facilitators (e.g., aspirin, vitamin E, folic acid), synthetic ribonucleases (e.g., imidazole, bisimidazole, histamine, imidazole clusters, acridine-imidazole conjugates, Eu3+ complexes of tetraazamacrocycles), dinitrophenyl, HRP, or AP.

[0458] Ligands can be proteins, e.g., glycoproteins, or peptides, e.g., molecules having a specific affinity for a co-ligand, or antibodies e.g., an antibody, that binds to a specified cell type such as a cancer cell, endothelial cell, or bone cell. Ligands may also include hormones and hormone receptors. They can also include non-peptidic species, such as lipids, lectins, carbohydrates, vitamins, cofactors, multivalent lactose, multivalent galactose, N-acetyl-galactosamine, N-acetyl-glucosamine multivalent mannose, or multivalent fucose. The ligand can be, for example, a lipopolysaccharide, an activator of p38 MAP kinase, or an activator of NF-κB.

[0459] The ligand can be a substance, e.g., a drug, which can increase the uptake of the iRNA agent into the cell, for example, by disrupting the cell's cytoskeleton, e.g., by disrupting the cell's microtubules, microfilaments, or intermediate filaments. The drug can be, for example, taxon, vincristine, vinblastine, cytochalasin, nocodazole, japlakinolide, latrunculin A, phalloidin, swinholide A, indanocine, or myoservin.

[0460] In some embodiments, a ligand attached to an iRNA as described herein acts as a pharmacokinetic modulator (PK modulator). PK modulators include lipophiles, bile acids, steroids, phospholipid analogues, peptides, protein binding agents, polyethylene glycol (PEG), vitamins etc. Exemplary PK modulators include, but are not limited to, cholesterol, fatty acids, cholic acid, lithocholic acid, dialkylglycerides, diacylglyceride, phospholipids, sphingolipids, naproxen, ibuprofen, vitamin E, biotin etc. Oligonucleotides that comprise a number of phosphorothioate linkages are also known to bind to serum protein, thus short oligonucleotides, e.g., oligonucleotides of about 5 bases, 10 bases, 15 bases or 20 bases, comprising multiple of phosphorothioate linkages in the backbone are also amenable to the present invention as ligands (e.g. as PK modulating ligands). In addition, aptamers that bind serum components (e.g. serum proteins) are also suitable for use as PK modulating ligands in the embodiments described herein.

[0461] Ligand-conjugated iRNAs of the invention may be synthesized by the use of an oligonucleotide that bears a pendant reactive functionality, such as that derived from the attachment of a linking molecule onto the oligonucleotide (described below). This reactive oligonucleotide may be reacted directly with commercially-available ligands, ligands that are synthesized bearing any of a variety of protecting groups, or ligands that have a linking moiety attached thereto.

[0462] The oligonucleotides used in the conjugates of the present invention may be conveniently and routinely made through the well-known technique of solid-phase synthesis. Equipment for such synthesis is sold by several vendors including, for example, Applied Biosystems® (Foster City, Calif.). Any other means for such synthesis known in the art may additionally or alternatively be employed. It is also known to use similar techniques to prepare other oligonucleotides, such as the phosphorothioates and alkylated derivatives.

[0463] In the ligand-conjugated oligonucleotides and ligand-molecule bearing sequence-specific linked nucleosides of the present invention, the oligonucleotides and oligonucleosides may be assembled on a suitable DNA synthesizer utilizing standard nucleotide or nucleoside precursors, or nucleotide or nucleoside conjugate precursors that already bear the linking moiety, ligand-nucleotide or nucleoside-conjugate precursors that already bear the ligand molecule, or non-nucleoside ligand-bearing building blocks.

[0464] When using nucleotide-conjugate precursors that already bear a linking moiety, the synthesis of the sequence-specific linked nucleosides is typically completed, and the ligand molecule is then reacted with the linking moiety to form the ligand-conjugated oligonucleotide. In some embodiments, the oligonucleotides or linked nucleosides of the present invention are synthesized by an automated synthesizer using phosphoramidites derived from ligand-nucleoside conjugates in addition to the standard phosphoramidites and non-standard phosphoramidites that are commercially available and routinely used in oligonucleotide synthesis.

### A. Lipid Conjugates

[0465] In certain embodiments, the ligand or conjugate is a lipid or lipid-based molecule. Such a lipid or lipid-based molecule can typically bind a serum protein, such as human serum albumin (HSA). An HSA binding ligand allows for distribution of the conjugate to a target tissue, e.g., a non-kidney target tissue of the body. For example, the target tissue can be the brain or the liver. Other molecules that can bind HSA can also be used as ligands. For example, naproxen or aspirin can be used. A lipid or lipid-based ligand can (a) increase resistance to degradation of the conjugate, (b) increase targeting or transport into a target cell or cell membrane, or (c) can be used to adjust binding to a serum protein, e.g., HSA.

[0466] A lipid-based ligand can be used to modulate, e.g., control (e.g., inhibit) the binding of the conjugate to a target tissue. For example, a lipid or lipid-based ligand that binds to HSA more strongly will be less likely to be targeted to the kidney and therefore less likely to be cleared from the body. A lipid or lipid-based ligand that binds to HSA less strongly can be used to target the conjugate to the kidney.

[0467] In certain embodiments, the lipid-based ligand binds HSA. For example, the ligand can bind HSA with a sufficient affinity such that distribution of the conjugate to a non-kidney tissue is enhanced. However, the affinity is typically not so strong that the HSA-ligand binding cannot be reversed.

[0468] In certain embodiments, the lipid-based ligand binds HSA weakly or not at all, such that distribution of the conjugate to the kidney is enhanced. Other moieties that target to kidney cells can also be used in place of or in addition to the lipid-based ligand.

[0469] In another aspect, the ligand is a moiety, e.g., a vitamin, which is taken up by a target cell, e.g., a proliferating cell. These are particularly useful for treating disorders characterized by unwanted cell proliferation, e.g., of the malignant or non-malignant type, e.g., cancer cells. Exemplary vitamins include vitamin A, E, and K. Other exemplary vitamins include are B vitamin, e.g., folic acid, B12, riboflavin, biotin, pyridoxal or other vitamins or nutrients taken up by cancer cells. Also included are HSA and low density lipoprotein (LDL).

### B. Cell Permeation Agents

[0470] In another aspect, the ligand is a cell-permeation agent, such as a helical cell-permeation agent. In certain embodiments, the agent is amphipathic. An exemplary agent is a peptide such as tat or antennopedia. If the agent is a peptide, it can be modified, including a peptidylmimetic, invertomers, non-peptide or pseudo-peptide linkages, and use of D-amino acids. The helical agent is typically an α-helical agent and can have a lipophilic and a lipophobic phase.

[0471] The ligand can be a peptide or peptidomimetic. A peptidomimetic (also referred to herein as an oligopeptidomimetic) is a molecule capable of folding into a defined three-dimensional structure similar to a natural peptide. The attachment of peptide and peptidomimetics to iRNA agents can affect pharmacokinetic distribution of the iRNA, such as by enhancing cellular recognition and absorption. The peptide or peptidomimetic moiety can be about 5-50 amino acids long, e.g., about 5, 10, 15, 20, 25, 30, 35, 40, 45, or 50 amino acids long.

[0472] A peptide or peptidomimetic can be, for example, a cell permeation peptide, cationic peptide, amphipathic peptide, or hydrophobic peptide (e.g., consisting primarily of Tyr, Trp, or Phe). The peptide moiety can be a dendrimer peptide, constrained peptide or crosslinked peptide. In another alternative, the peptide moiety can include a hydrophobic membrane translocation sequence (MTS). An exemplary hydrophobic MTS-containing peptide is RFGF having the amino acid sequence AAVALLPAVLLALLAP (SEQ ID NO: 3). An RFGF analogue (e.g., amino acid sequence AALLPVLLAAP (SEQ ID NO: 4)) containing a hydrophobic MITS can also be a targeting moiety. The peptide moiety can be a “delivery” peptide, which can carry large polar molecules including peptides, oligonucleotides, and protein across cell membranes. For example, sequences from the HIV Tat protein (GRKKRRQRRRPPQ (SEQ ID NO: 5)) and the Drosophila Antennapedia protein (RQIKIWFQNRRMKWKK (SEQ ID NO: 6)) have been found to be capable of functioning as delivery peptides. A peptide or peptidomimetic can be encoded by a random sequence of DNA, such as a peptide identified from a phage-display library, or one-bead-one-compound (OBOC) combinatorial library (Lain et al., Nature, 354:82-84, 1991). Typically, the peptide or peptidomimetic tethered to a dsRNA agent via an incorporated monomer unit is a cell targeting peptide such as an arginine-glycine-aspartic acid (RGD)-peptide, or RGD mimic. A peptide moiety can range in length from about 5 amino acids to about 40 amino acids. The peptide moieties can have a structural modification, such as to increase stability or direct conformational properties. Any of the structural modifications described below can be utilized.

[0473] An RGD peptide for use in the compositions and methods of the invention may be linear or cyclic, and may be modified, e.g., glycosylated or methylated, to facilitate targeting to a specific tissue(s). RGD-containing peptides and peptidiomimetics may include D-amino acids, as well as synthetic RGD mimics. In addition to RGD, one can use other moieties that target the integrin ligand. In certain embodiments, conjugates of this ligand target PECAM-1 or VEGF.

[0474] An RGD peptide moiety can be used to target a particular cell type, e.g., a tumor cell, such as an endothelial tumor cell or a breast cancer tumor cell (Zitzmann et al., Cancer Res., 62:5139-43, 2002). An RGD peptide can facilitate targeting of an dsRNA agent to tumors of a variety of other tissues, including the lung, kidney, spleen, or liver (Aoki et al., Cancer Gene Therapy 8:783-787, 2001). Typically, the RGD peptide will facilitate targeting of an iRNA agent to the kidney. The RGD peptide can be linear or cyclic, and can be modified, e.g., glycosylated or methylated to facilitate targeting to specific tissues. For example, a glycosylated RGD peptide can deliver an iRNA agent to a tumor cell expressing αᵥβ₃ (Haubner et al., Jour. Nucl. Med, 42:326-336, 2001).

[0475] A “cell permeation peptide” is capable of permeating a cell, e.g., a microbial cell, such as a bacterial or fungal cell, or a mammalian cell, such as a human cell. A microbial cell-permeating peptide can be, for example, an α-helical linear peptide (e.g., LL-37 or Ceropin P1), a disulfide bond-containing peptide (e.g., α-defensin, D-defensin or bactenecin), or a peptide containing only one or two dominating amino acids (e.g., PR-39 or indolicidin). A cell permeation peptide can also include a nuclear localization signal (NLS). For example, a cell permeation peptide can be a bipartite amphipathic peptide, such as MPG, which is derived from the fusion peptide domain of HIV-1 gp41 and the NLS of SV40 large T antigen (Simeoni et al., Nucl. Acids Res. 31:2717-2724, 2003).

### C. Carbohydrate Conjugates

[0476] In some embodiments of the compositions and methods of the invention, an iRNA further comprises a carbohydrate. The carbohydrate conjugated iRNA are advantageous for the in vivo delivery of nucleic acids, as well as compositions suitable for in vivo therapeutic use, as described herein. As used herein, “carbohydrate” refers to a compound which is either a carbohydrate per se made up of one or more monosaccharide units having at least 6 carbon atoms (which can be linear, branched or cyclic) with an oxygen, nitrogen or sulfur atom bonded to each carbon atom; or a compound having as a part thereof a carbohydrate moiety made up of one or more monosaccharide units each having at least six carbon atoms (which can be linear, branched or cyclic), with an oxygen, nitrogen or sulfur atom bonded to each carbon atom. Representative carbohydrates include the sugars (mono-, di-, tri- and oligosaccharides containing from about 4, 5, 6, 7, 8, or 9 monosaccharide units), and polysaccharides such as starches, glycogen, cellulose and polysaccharide gums. Specific monosaccharides include C5 and above (e.g., C5, C6, C7, or C8) sugars; di- and tri-saccharides include sugars having two or three monosaccharide units (e.g., C5, C6, C7, or C8).

[0477] In certain embodiments, a carbohydrate conjugate comprises a monosaccharide.

[0478] In certain embodiments, the monosaccharide is an N-acetylgalactosamine (GalNAc). GalNAc conjugates, which comprise one or more N-acetylgalactosamine (GalNAc) derivatives, are described, for example, in U.S. Pat. No. 8,106,022, the entire content of which is hereby incorporated herein by reference. In some embodiments, the GalNAc conjugate serves as a ligand that targets the iRNA to particular cells. In some embodiments, the GalNAc conjugate targets the iRNA to liver cells, e.g., by serving as a ligand for the asialoglycoprotein receptor of liver cells (e.g., hepatocytes).

[0479] In some embodiments, the carbohydrate conjugate comprises one or more GalNAc derivatives. The GalNAc derivatives may be attached via a linker, e.g., a bivalent or trivalent branched linker. In some embodiments the GalNAc conjugate is conjugated to the 3′ end of the sense strand. In some embodiments, the GalNAc conjugate is conjugated to the iRNA agent (e.g., to the 3′ end of the sense strand) via a linker, e.g., a linker as described herein. In some embodiments the GalNAc conjugate is conjugated to the 5′ end of the sense strand. In some embodiments, the GalNAc conjugate is conjugated to the iRNA agent (e.g., to the 5′ end of the sense strand) via a linker, e.g., a linker as described herein.

[0480] In certain embodiments of the invention, the GalNAc or GalNAc derivative is attached to an iRNA agent of the invention via a monovalent linker. In some embodiments, the GalNAc or GalNAc derivative is attached to an iRNA agent of the invention via a bivalent linker. In yet other embodiments of the invention, the GalNAc or GalNAc derivative is attached to an iRNA agent of the invention via a trivalent linker. In other embodiments of the invention, the GalNAc or GalNAc derivative is attached to an iRNA agent of the invention via a tetravalent linker.

[0481] In certain embodiments, the double stranded RNAi agents of the invention comprise one GalNAc or GalNAc derivative attached to the iRNA agent. In certain embodiments, the double stranded RNAi agents of the invention comprise a plurality (e.g., 2, 3, 4, 5, or 6) GalNAc or GalNAc derivatives, each independently attached to a plurality of nucleotides of the double stranded RNAi agent through a plurality of monovalent linkers.

[0482] In some embodiments, for example, when the two strands of an iRNA agent of the invention are part of one larger molecule connected by an uninterrupted chain of nucleotides between the 3′-end of one strand and the 5′-end of the respective other strand forming a hairpin loop comprising, a plurality of unpaired nucleotides, each unpaired nucleotide within the hairpin loop may independently comprise a GalNAc or GalNAc derivative attached via a monovalent linker. The hairpin loop may also be formed by an extended overhang in one strand of the duplex.

[0483] In some embodiments, for example, when the two strands of an iRNA agent of the invention are part of one larger molecule connected by an uninterrupted chain of nucleotides between the 3′-end of one strand and the 5′-end of the respective other strand forming a hairpin loop comprising, a plurality of unpaired nucleotides, each unpaired nucleotide within the hairpin loop may independently comprise a GalNAc or GalNAc derivative attached via a monovalent linker. The hairpin loop may also be formed by an extended overhang in one strand of the duplex.

[0484] In some embodiments, the GalNAc conjugate is

[chemical structure]

[0485] In some embodiments, the RNAi agent is attached to the carbohydrate conjugate via a linker as shown in the following schematic, wherein X is O or S

[chemical structure]

[0486] In some embodiments, the RNAi agent is conjugated to L96 as defined in Table 2 and shown below:

[chemical structure]

[0487] In certain embodiments, a carbohydrate conjugate for use in the compositions and methods of the invention is selected from the group consisting of:

[chemical structure]

[chemical structure]

[chemical structure]

[chemical structure]

[chemical structure]

wherein Y is O or S and n is 3-6 (Formula XXIV);

[chemical structure]

wherein Y is O or S and n is 3-6 (Formula XXV);

[chemical structure]

wherein X is O or S (Formula XXVII);

[chemical structure]

### Formula XXXIV.

[0488] In certain embodiments, a carbohydrate conjugate for use in the compositions and methods of the invention is a monosaccharide. In certain embodiments, the monosaccharide is an N-acetylgalactosamine, such as

[chemical structure]

[0489] Another representative carbohydrate conjugate for use in the embodiments described herein includes, but is not limited to,

[chemical structure]

[0490] when one of X or Y is an oligonucleotide, the other is a hydrogen.

[0491] In some embodiments, a suitable ligand is a ligand disclosed in WO 2019/055633, the entire contents of which are incorporated herein by reference. In one embodiment the ligand comprises the structure below:

[chemical structure]

[0492] In certain embodiments, the RNAi agents of the disclosure may include GalNAc ligands, even if such GalNAc ligands are currently projected to be of limited value for intrathecal/CNS delivery route(s) of the instant disclosure.

[0493] In certain embodiments of the invention, the GalNAc or GalNAc derivative is attached to an iRNA agent of the invention via a monovalent linker. In some embodiments, the GalNAc or GalNAc derivative is attached to an iRNA agent of the invention via a bivalent linker. In yet other embodiments of the invention, the GalNAc or GalNAc derivative is attached to an iRNA agent of the invention via a trivalent linker.

[0494] In one embodiment, the double stranded RNAi agents of the invention comprise one or more GalNAc or GalNAc derivative attached to the iRNA agent. The GalNAc may be attached to any nucleotide via a linker on the sense strand or antisense strand. The GalNac may be attached to the 5′-end of the sense strand, the 3′ end of the sense strand, the 5′-end of the antisense strand, or the 3′-end of the antisense strand. In one embodiment, the GalNAc is attached to the 3′ end of the sense strand, e.g., via a trivalent linker.

[0495] In other embodiments, the double stranded RNAi agents of the invention comprise a plurality (e.g., 2, 3, 4, 5, or 6) GalNAc or GalNAc derivatives, each independently attached to a plurality of nucleotides of the double stranded RNAi agent through a plurality of linkers, e.g., monovalent linkers.

[0496] In some embodiments, for example, when the two strands of an iRNA agent of the invention is part of one larger molecule connected by an uninterrupted chain of nucleotides between the 3′-end of one strand and the 5′-end of the respective other strand forming a hairpin loop comprising, a plurality of unpaired nucleotides, each unpaired nucleotide within the hairpin loop may independently comprise a GalNAc or GalNAc derivative attached via a monovalent linker.

[0497] In some embodiments, the carbohydrate conjugate further comprises one or more additional ligands as described above, such as, but not limited to, a PK modulator or a cell permeation peptide.

[0498] Additional carbohydrate conjugates and linkers suitable for use in the present invention include those described in WO 2014/179620 and WO 2014/179627, the entire contents of each of which are incorporated herein by reference.

### D. Linkers

[0499] In some embodiments, the conjugate or ligand described herein can be attached to an iRNA oligonucleotide with various linkers that can be cleavable or non-cleavable.

[0500] The term “linker” or “linking group” means an organic moiety that connects two parts of a compound, e.g., covalently attaches two parts of a compound. Linkers typically comprise a direct bond or an atom such as oxygen or sulfur, a unit such as NR8, C(O), C(O)NH, SO, SO₂, SO₂NH or a chain of atoms, such as, but not limited to, substituted or unsubstituted alkyl, substituted or unsubstituted alkenyl, substituted or unsubstituted alkynyl, arylalkyl, arylalkenyl, arylalkynyl, heteroarylalkyl, heteroarylalkenyl, heteroarylalkynyl, heterocyclylalkyl, heterocyclylalkenyl, heterocyclylalkynyl, aryl, heteroaryl, heterocyclyl, cycloalkyl, cycloalkenyl, alkylarylalkyl, alkylarylalkenyl, alkylarylalkynyl, alkenylarylalkyl, alkenylarylalkenyl, alkenylarylalkynyl, alkynylarylalkyl, alkynylarylalkenyl, alkynylarylalkynyl, alkylheteroarylalkyl, alkylheteroarylalkenyl, alkylheteroarylalkynyl, alkenylheteroarylalkyl, alkenylheteroarylalkenyl, alkenylheteroarylalkynyl, alkynylheteroarylalkyl, alkynylheteroarylalkenyl, alkynylheteroarylalkynyl, alkylheterocyclylalkyl, alkylheterocyclylalkenyl, alkylhererocyclylalkynyl, alkenylheterocyclylalkyl, alkenylheterocyclylalkenyl, alkenylheterocyclylalkynyl, alkynylheterocyclylalkyl, alkynylheterocyclylalkenyl, alkynylheterocyclylalkynyl, alkylaryl, alkenylaryl, alkynylaryl, alkylheteroaryl, alkenylheteroaryl, alkynylhereroaryl, which one or more methylenes can be interrupted or terminated by O, S, S(O), SO₂, N(R8), C(O), substituted or unsubstituted aryl, substituted or unsubstituted heteroaryl, substituted or unsubstituted heterocyclic; where R8 is hydrogen, acyl, aliphatic or substituted aliphatic. In certain embodiments, the linker is between about 1-24 atoms, 2-24, 3-24, 4-24, 5-24, 6-24, 6-18, 7-18, 8-18 atoms, 7-17, 8-17, 6-16, 7-16, or 8-16 atoms.

[0501] A cleavable linking group is one which is sufficiently stable outside the cell, but which upon entry into a target cell is cleaved to release the two parts the linker is holding together. In another embodiment, the cleavable linking group is cleaved at least about 10 times, 20, times, 30 times, 40 times, 50 times, 60 times, 70 times, 80 times, 90 times or more, or at least about 100 times faster in a target cell or under a first reference condition (which can, e.g., be selected to mimic or represent intracellular conditions) than in the blood of a subject, or under a second reference condition (which can, e.g., be selected to mimic or represent conditions found in the blood or serum).

[0502] Cleavable linking groups are susceptible to cleavage agents, e.g., pH, redox potential or the presence of degradative molecules. Generally, cleavage agents are more prevalent or found at higher levels or activities inside cells than in serum or blood. Examples of such degradative agents include: redox agents which are selected for particular substrates or which have no substrate specificity, including, e.g., oxidative or reductive enzymes or reductive agents such as mercaptans, present in cells, that can degrade a redox cleavable linking group by reduction; esterases; endosomes or agents that can create an acidic environment, e.g., those that result in a pH of five or lower; enzymes that can hydrolyze or degrade an acid cleavable linking group by acting as a general acid, peptidases (which can be substrate specific), and phosphatases.

[0503] A cleavable linkage group, such as a disulfide bond can be susceptible to pH. The pH of human serum is 7.4, while the average intracellular pH is slightly lower, ranging from about 7.1-7.3. Endosomes have a more acidic pH, in the range of 5.5-6.0, and lysosomes have an even more acidic pH at around 5.0. Some linkers will have a cleavable linking group that is cleaved at a selected pH, thereby releasing a cationic lipid from the ligand inside the cell, or into the desired compartment of the cell.

[0504] A linker can include a cleavable linking group that is cleavable by a particular enzyme. The type of cleavable linking group incorporated into a linker can depend on the cell to be targeted. For example, a liver-targeting ligand can be linked to a cationic lipid through a linker that includes an ester group. Liver cells are rich in esterases, and therefore the linker will be cleaved more efficiently in liver cells than in cell types that are not esterase-rich. Other cell-types rich in esterases include cells of the lung, renal cortex, and testis.

[0505] Linkers that contain peptide bonds can be used when targeting cell types rich in peptidases, such as liver cells and synoviocytes.

[0506] In general, the suitability of a candidate cleavable linking group can be evaluated by testing the ability of a degradative agent (or condition) to cleave the candidate linking group. It will also be desirable to also test the candidate cleavable linking group for the ability to resist cleavage in the blood or when in contact with other non-target tissue. Thus, one can determine the relative susceptibility to cleavage between a first and a second condition, where the first is selected to be indicative of cleavage in a target cell and the second is selected to be indicative of cleavage in other tissues or biological fluids, e.g., blood or serum. The evaluations can be carried out in cell free systems, in cells, in cell culture, in organ or tissue culture, or in whole animals. It can be useful to make initial evaluations in cell-free or culture conditions and to confirm by further evaluations in whole animals. In certain embodiments, useful candidate compounds are cleaved at least about 2, 4, 10, 20, 30, 40, 50, 60, 70, 80, 90, or about 100 times faster in the cell (or under in vitro conditions selected to mimic intracellular conditions) as compared to blood or serum (or under in vitro conditions selected to mimic extracellular conditions).

i. Redox Cleavable Linking Groups

[0507] In certain embodiments, a cleavable linking group is a redox cleavable linking group that is cleaved upon reduction or oxidation. An example of reductively cleavable linking group is a disulphide linking group (—S—S—). To determine if a candidate cleavable linking group is a suitable “reductively cleavable linking group,” or for example is suitable for use with a particular iRNA moiety and particular targeting agent one can look to methods described herein. For example, a candidate can be evaluated by incubation with dithiothreitol (DTT), or other reducing agent using reagents know in the art, which mimic the rate of cleavage which would be observed in a cell, e.g., a target cell. The candidates can also be evaluated under conditions which are selected to mimic blood or serum conditions. In one, candidate compounds are cleaved by at most about 10% in the blood. In other embodiments, useful candidate compounds are degraded at least about 2, 4, 10, 20, 30, 40, 50, 60, 70, 80, 90, or about 100 times faster in the cell (or under in vitro conditions selected to mimic intracellular conditions) as compared to blood (or under in vitro conditions selected to mimic extracellular conditions). The rate of cleavage of candidate compounds can be determined using standard enzyme kinetics assays under conditions chosen to mimic intracellular media and compared to conditions chosen to mimic extracellular media.

Ii. Phosphate-Based Cleavable Linking Groups

[0508] In certain embodiments, a cleavable linker comprises a phosphate-based cleavable linking group. A phosphate-based cleavable linking group is cleaved by agents that degrade or hydrolyze the phosphate group. An example of an agent that cleaves phosphate groups in cells are enzymes such as phosphatases in cells. Examples of phosphate-based linking groups are —O—P(O)(ORk)-O—, —O—P(S)(ORk)-O—, —O—P(S)(SRk)-O—, —S—P(O)(ORk)-O—, —O—P(O)(ORk)-S—, —S—P(O)(ORk)-S—, —O—P(S)(ORk)-S—, —S—P(S)(ORk)-O—, —O—P(O)(Rk)-O—, —O—P(S)(Rk)-O—, —S—P(O)(Rk)-O—, —S—P(S)(Rk)-O—, —S—P(O)(Rk)-S—, —O—P(S)(Rk)-S—, wherein Rk at each occurrence can be, independently, C1-C20 alkyl, C1-C20 haloalkyl, C6-C10 aryl, or C7-C12 aralkyl. Additional embodiments include —O—P(O)(OH)—O—, —O—P(S)(OH)—O—, —O—P(S)(SH)—O—, —S—P(O)(OH)—O—, —O—P(O)(OH)—S—, —S—P(O)(OH)—S—, —O—P(S)(OH)—S—, —S—P(S)(OH)—O—, —O—P(O)(H)—O—, —O—P(S)(H)—O—, —S—P(O)(H)—O, —S—P(S)(H)—O—, —S—P(O)(H)—S—, —O—P(S)(H)—S—, wherein Rk at each occurrence can be, independently, C1-C20 alkyl, C1-C20 haloalkyl, C6-C10 aryl, or C7-C12 aralkyl. In certain embodiments, a phosphate-based linking group is —O—P(O)(OH)—O—. These candidates can be evaluated using methods analogous to those described above.

Iii. Acid Cleavable Linking Groups

[0509] In certain embodiments, a cleavable linker comprises an acid cleavable linking group. An acid cleavable linking group is a linking group that is cleaved under acidic conditions. In one embodiment, acid cleavable linking groups are cleaved in an acidic environment with a pH of about 6.5 or lower (e.g., about 6.0, 5.75, 5.5, 5.25, 5.0, or lower), or by agents such as enzymes that can act as a general acid. In a cell, specific low pH organelles, such as endosomes and lysosomes can provide a cleaving environment for acid cleavable linking groups. Examples of acid cleavable linking groups include but are not limited to hydrazones, esters, and esters of amino acids. Acid cleavable groups can have the general formula —C═NN—, C(O)O, or —OC(O). Another embodiment is when the carbon attached to the oxygen of the ester (the alkoxy group) is an aryl group, substituted alkyl group, or tertiary alkyl group such as dimethyl pentyl or t-butyl. These candidates can be evaluated using methods analogous to those described above.

iv. Ester-Based Cleavable Linking Groups

[0510] In certain embodiments, a cleavable linker comprises an ester-based cleavable linking group. An ester-based cleavable linking group is cleaved by enzymes such as esterases and amidases in cells. Examples of ester-based cleavable linking groups include but are not limited to esters of alkylene, alkenylene and alkynylene groups. Ester cleavable linking groups have the general formula —C(O)O—, or —OC(O)—. These candidates can be evaluated using methods analogous to those described above.

v. Peptide-Based Cleavable Linking Groups

[0511] In yet another embodiment, a cleavable linker comprises a peptide-based cleavable linking group. A peptide-based cleavable linking group is cleaved by enzymes such as peptidases and proteases in cells. Peptide-based cleavable linking groups are peptide bonds formed between amino acids to yield oligopeptides (e.g., dipeptides, tripeptides etc.) and polypeptides. Peptide-based cleavable groups do not include the amide group (—C(O)NH—). The amide group can be formed between any alkylene, alkenylene or alkynelene. A peptide bond is a special type of amide bond formed between amino acids to yield peptides and proteins. The peptide based cleavage group is generally limited to the peptide bond (i.e., the amide bond) formed between amino acids yielding peptides and proteins and does not include the entire amide functional group. Peptide-based cleavable linking groups have the general formula —NHCHR^{A}C(O)NHCHR^{B}C(O)—, where R^{A} and R^{B} are the R groups of the two adjacent amino acids. These candidates can be evaluated using methods analogous to those described above.

[0512] In some embodiments, an iRNA of the invention is conjugated to a carbohydrate through a linker. Non-limiting examples of iRNA carbohydrate conjugates with linkers of the compositions and methods of the invention include, but are not limited to,

[chemical structure]

[chemical structure]

[chemical structure]

when one of X or Y is an oligonucleotide, the other is a hydrogen.

[0513] In certain embodiments of the compositions and methods of the invention, a ligand is one or more “GalNAc” (N-acetylgalactosamine) derivatives attached through a bivalent or trivalent branched linker.

[0514] In certain embodiments, a dsRNA of the invention is conjugated to a bivalent or trivalent branched linker selected from the group of structures shown in any of formula (XLV)-(XLVI):

[chemical structure]

[0515] wherein:
[0516] q2A, q2B, q3A, q3B, q4A, q4B, q5A, q5B and q5C represent independently for each occurrence 0-20 and wherein the repeating unit can be the same or different;
[0517] P^{2A}, P^{2B}, P^{3A}, P^{3B}, P^{4A}, P^{4B}, P^{5A}, P^{5B}, P^{5C}, T^{2A}, T^{2B}, T^{3A}, T^{3B}, T^{4A}, T^{4B}, T^{4A}, T^{5B}, T^{5C} are each independently for each occurrence absent, CO, NH, O, S, OC(O), NHC(O), CH₂, CH₂NH or CH₂O;
[0518] Q^{2A}, Q^{2B}, Q^{3A}, Q^{3B}, Q^{4A}, Q^{4B}, Q^{5A}, Q^{5B}, Q^{5C} are independently for each occurrence absent, alkylene, substituted alkylene wherein one or more methylenes can be interrupted or terminated by one or more of O, S, S(O), SO₂, N(R^{N}), C(R′)═C(R″), C≡C or C(O);
[0519] R^{2A}, R^{2B}, R^{3A}, R^{3B}, R^{4A}, R^{4B}, R^{5A}, R^{5B}, R^{5C} are each independently for each occurrence absent, NH, O, S, CH₂, C(O)O, C(O)NH, NHCH(R^{a})C(O), —C(O)—CH(R^{a})—NH—, CO, CH═N—O,

[chemical structure]

or heterocyclyl;
[0520] L^{2A}, L^{2B}, L^{3A}, L^{3B}, L^{4A}, L^{4B}, L^{5A}, L^{5B} and L^{5C} represent the ligand; i.e. each independently for each occurrence a monosaccharide (such as GalNAc), disaccharide, trisaccharide, tetrasaccharide, oligosaccharide, or polysaccharide; and R^{a} is H or amino acid side chain. Trivalent conjugating GalNAc derivatives are particularly useful for use with RNAi agents for inhibiting the expression of a target gene, such as those of formula (XLIX):

[chemical structure]

[0521] wherein L^{5A}, L^{5B} and L^{5C} represent a monosaccharide, such as GalNAc derivative.

[0522] Examples of suitable bivalent and trivalent branched linker groups conjugating GalNAc derivatives include, but are not limited to, the structures recited above as formulas II, VII, XI, X, and XIII.

[0523] Representative U.S. patents that teach the preparation of RNA conjugates include, but are not limited to, U.S. Pat. Nos. 4,828,979; 4,948,882; 5,218,105; 5,525,465; 5,541,313; 5,545,730; 5,552,538; 5,578,717, 5,580,731; 5,591,584; 5,109,124; 5,118,802; 5,138,045; 5,414,077; 5,486,603; 5,512,439; 5,578,718; 5,608,046; 4,587,044; 4,605,735; 4,667,025; 4,762,779; 4,789,737; 4,824,941; 4,835,263; 4,876,335; 4,904,582; 4,958,013; 5,082,830; 5,112,963; 5,214,136; 5,082,830; 5,112,963; 5,214,136; 5,245,022; 5,254,469; 5,258,506; 5,262,536; 5,272,250; 5,292,873; 5,317,098; 5,371,241, 5,391,723; 5,416,203, 5,451,463; 5,510,475; 5,512,667; 5,514,785; 5,565,552; 5,567,810; 5,574,142; 5,585,481; 5,587,371; 5,595,726; 5,597,696; 5,599,923; 5,599,928; 5,688,941; 6,294,664; 6,320,017; 6,576,752; 6,783,931; 6,900,297; 7,037,646; and 8,106,022, the entire contents of each of which are hereby incorporated herein by reference.

[0524] It is not necessary for all positions in a given compound to be uniformly modified, and in fact more than one of the aforementioned modifications can be incorporated in a single compound or even at a single nucleoside within an iRNA. The present invention also includes iRNA compounds that are chimeric compounds.

[0525] “Chimeric” iRNA compounds or “chimeras,” in the context of this invention, are iRNA compounds, preferably dsRNA agents, that contain two or more chemically distinct regions, each made up of at least one monomer unit, i.e., a nucleotide in the case of a dsRNA compound. These iRNAs typically contain at least one region wherein the RNA is modified so as to confer upon the iRNA increased resistance to nuclease degradation, increased cellular uptake, or increased binding affinity for the target nucleic acid. An additional region of the iRNA can serve as a substrate for enzymes capable of cleaving RNA:DNA or RNA:RNA hybrids. By way of example, RNase H is a cellular endonuclease which cleaves the RNA strand of an RNA:DNA duplex. Activation of RNase H, therefore, results in cleavage of the RNA target, thereby greatly enhancing the efficiency of iRNA inhibition of gene expression. Consequently, comparable results can often be obtained with shorter iRNAs when chimeric dsRNAs are used, compared to phosphorothioate deoxy dsRNAs hybridizing to the same target region. Cleavage of the RNA target can be routinely detected by gel electrophoresis and, if necessary, associated nucleic acid hybridization techniques known in the art.

[0526] In certain instances, the RNA of an iRNA can be modified by a non-ligand group. A number of non-ligand molecules have been conjugated to iRNAs in order to enhance the activity, cellular distribution or cellular uptake of the iRNA, and procedures for performing such conjugations are available in the scientific literature. Such non-ligand moieties have included lipid moieties, such as cholesterol (Kubo, T. et al., Biochem. Biophys. Res. Comm., 2007, 365(1):54-61; Letsinger et al., Proc. Natl. Acad. Sci. USA, 1989, 86:6553), cholic acid (Manoharan et al., Bioorg. Med. Chem. Lett., 1994, 4:1053), a thioether, e.g., hexyl-S-tritylthiol (Manoharan et al., Ann. N Y Acad. Sci., 1992, 660:306; Manoharan et al., Bioorg. Med. Chem. Let., 1993, 3:2765), a thiocholesterol (Oberhauser et al., Nucl. Acids Res., 1992, 20:533), an aliphatic chain, e.g., dodecandiol or undecyl residues (Saison-Behmoaras et al., EMBO J., 1991, 10:111; Kabanov et al., FEBS Lett., 1990, 259:327; Svinarchuk et al., Biochimie, 1993, 75:49), a phospholipid, e.g., di-hexadecyl-rac-glycerol or triethylammonium 1,2-di-O-hexadecyl-rac-glycero-3-H-phosphonate (Manoharan et al., Tetrahedron Lett., 1995, 36:3651; Shea et al., Nucl. Acids Res., 1990, 18:3777), a polyamine or a polyethylene glycol chain (Manoharan et al., Nucleosides & Nucleotides, 1995, 14:969), or adamantane acetic acid (Manoharan et al., Tetrahedron Lett., 1995, 36:3651), a palmityl moiety (Mishra et al., Biochim. Biophys. Acta, 1995, 1264:229), or an octadecylamine or hexylamino-carbonyl-oxycholesterol moiety (Crooke et al., J. Pharmacol. Exp. Ther., 1996, 277:923). Representative United States patents that teach the preparation of such RNA conjugates have been listed above. Typical conjugation protocols involve the synthesis of RNAs bearing an aminolinker at one or more positions of the sequence. The amino group is then reacted with the molecule being conjugated using appropriate coupling or activating reagents. The conjugation reaction can be performed either with the RNA still bound to the solid support or following cleavage of the RNA, in solution phase. Purification of the RNA conjugate by HPLC typically affords the pure conjugate.

### V. Delivery of an RNAi Agent of the Disclosure

[0527] The delivery of an RNAi agent of the disclosure to a cell e.g., a cell within a subject, such as a human subject (e.g., a subject in need thereof, such as a subject having an ABLIM3-associated disorder, e.g., PTSD or age-related memory loss, can be achieved in a number of different ways. For example, delivery may be performed by contacting a cell with an RNAi agent of the disclosure either in vitro or in vivo. In vivo delivery may also be performed directly by administering a composition comprising an RNAi agent, e.g., a dsRNA, to a subject. Alternatively, in vivo delivery may be performed indirectly by administering one or more vectors that encode and direct the expression of the RNAi agent. These alternatives are discussed further below.

[0528] In general, any method of delivering a nucleic acid molecule (in vitro or in vivo) can be adapted for use with an RNAi agent of the disclosure (see e.g., Akhtar S. and Julian R L., (1992) Trends Cell. Biol. 2(5):139-144 and WO94/02595, which are incorporated herein by reference in their entireties). For in vivo delivery, factors to consider in order to deliver an RNAi agent include, for example, biological stability of the delivered agent, prevention of non-specific effects, and accumulation of the delivered agent in the target tissue. The non-specific effects of an RNAi agent can be minimized by local administration, for example, by direct injection or implantation into a tissue or topically administering the preparation. Local administration to a treatment site maximizes local concentration of the agent, limits the exposure of the agent to systemic tissues that can otherwise be harmed by the agent or that can degrade the agent, and permits a lower total dose of the RNAi agent to be administered. Several studies have shown successful knockdown of gene products when an RNAi agent is administered locally. For example, intraocular delivery of a VEGF dsRNA by intravitreal injection in cynomolgus monkeys (Tolentino, M J. et al., (2004) Retina 24:132-138) and subretinal injections in mice (Reich, S J. et al. (2003) Mol. Vis. 9:210-216) were both shown to prevent neovascularization in an experimental model of age-related macular degeneration. In addition, direct intratumoral injection of a dsRNA in mice reduces tumor volume (Pille, J. et al. (2005)Mol. Ther. 11:267-274) and can prolong survival of tumor-bearing mice (Kim, W J. et al., (2006) Mol. Ther. 14:343-350; Li, S. et al., (2007) Mol. Ther. 15:515-523). RNA interference has also shown success with local delivery to the CNS by direct injection (Don, G. et al., (2004) Nucleic Acids 32:e49; Tan, P H. et al. (2005) Gene Ther. 12:59-66; Makimura, H. et al. (2002) BMC Neurosci. 3:18; Shishkina, G T., et al. (2004) Neuroscience 129:521-528; Thakker, E R., et al. (2004) Proc. Natl. Acad. Sci. U.S.A. 101:17270-17275; Akaneya, Y., et al. (2005) J Neurophysiol. 93:594-602) and to the lungs by intranasal administration (Howard, K A. et al., (2006) Mol. Ther. 14:476-484; Zhang, X. et al., (2004) J. Biol. Chem. 279:10677-10684; Bitko, V. et al., (2005) Nat. Med. 11:50-55). For administering an RNAi agent systemically for the treatment of a disease, the RNA can be modified or alternatively delivered using a drug delivery system; both methods act to prevent the rapid degradation of the dsRNA by endo- and exo-nucleases in vivo. Modification of the RNA or the pharmaceutical carrier can also permit targeting of the RNAi agent to the target tissue and avoid undesirable off-target effects (e.g., without wishing to be bound by theory, use of GNAs as described herein has been identified to destabilize the seed region of a dsRNA, resulting in enhanced preference of such dsRNAs for on-target effectiveness, relative to off-target effects, as such off-target effects are significantly weakened by such seed region destabilization). RNAi agents can be modified by chemical conjugation to lipophilic groups such as cholesterol to enhance cellular uptake and prevent degradation. For example, an RNAi agent directed against ApoB conjugated to a lipophilic cholesterol moiety was injected systemically into mice and resulted in knockdown of apoB mRNA in both the liver and jejunum (Soutschek, J. et al., (2004) Nature 432:173-178). Conjugation of an RNAi agent to an aptamer has been shown to inhibit tumor growth and mediate tumor regression in a mouse model of prostate cancer (McNamara, J O. et al., (2006) Nat. Biotechnol. 24:1005-1015). In an alternative embodiment, the RNAi agent can be delivered using drug delivery systems such as a nanoparticle, a dendrimer, a polymer, liposomes, or a cationic delivery system. Positively charged cationic delivery systems facilitate binding of molecule RNAi agent (negatively charged) and also enhance interactions at the negatively charged cell membrane to permit efficient uptake of an RNAi agent by the cell. Cationic lipids, dendrimers, or polymers can either be bound to an RNAi agent, or induced to form a vesicle or micelle (see e.g., Kim S H. et al., (2008) Journal of Controlled Release 129(2):107-116) that encases an RNAi agent. The formation of vesicles or micelles further prevents degradation of the RNAi agent when administered systemically. Methods for making and administering cationic-RNAi agent complexes are well within the abilities of one skilled in the art (see e.g., Sorensen, D R., et al. (2003) J. Mol. Biol 327:761-766; Verma, U N. et al., (2003) Clin. Cancer Res. 9:1291-1300; Arnold, A S et al. (2007) J. Hypertens. 25:197-205, which are incorporated herein by reference in their entirety). Some non-limiting examples of drug delivery systems useful for systemic delivery of RNAi agents include DOTAP (Sorensen, D R., et al (2003), supra; Verma, U N. et al., (2003), supra), Oligofectamine, “solid nucleic acid lipid particles” (Zimmermann, T S. et al., (2006) Nature 441:111-114), cardiolipin (Chien, P Y. et al., (2005) Cancer Gene Ther. 12:321-328; Pal, A. et al., (2005) IntJ. Oncol. 26:1087-1091), polyethyleneimine (Bonnet M E. et al., (2008) Pharm. Res. August 16 Epub ahead of print; Aigner, A. (2006) J. Biomed Biotechnol. 71659), Arg-Gly-Asp (RGD) peptides (Liu. S. (2006) Mol. Pharm. 3:472-487), and polyamidoamines (Tomalia, D A. et al., (2007) Biochem. Soc. Trans. 35:61-67; Yoo, H. et al., (1999) Pharm. Res. 16:1799-1804). In some embodiments, an RNAi agent forms a complex with cyclodextrin for systemic administration. Methods for administration and pharmaceutical compositions of RNAi agents and cyclodextrins can be found in U.S. Pat. No. 7,427,605, which is herein incorporated by reference in its entirety.

[0529] Certain aspects of the instant disclosure relate to a method of reducing the expression of an ABLIM3 target gene in a cell, comprising contacting said cell with the double-stranded RNAi agent of the disclosure. In one embodiment, the cell is a CNS cell, such as a brain cell. In other embodiment, the cell is a dentate granule cell, neuron, an astrocyte, or an oligodendrocyte.

[0530] Another aspect of the disclosure relates to a method of reducing the expression of an ABLIM3 target gene in a subject, comprising administering to the subject the double-stranded RNAi agent of the disclosure.

[0531] Another aspect of the disclosure relates to a method of treating a subject having PTSD or age-related memory loss, comprising administering to the subject a therapeutically effective amount of the double-stranded ABLIM3-targeting RNAi agent of the disclosure, thereby treating the subject.

[0532] Another aspect of the disclosure relates to a method of preventing a sign or a symptom in a subject having PTSD or age-related memory loss, comprising administering to the subject a therapeutically effective amount of the double-stranded ABLIM3-targeting RNAi agent of the disclosure, thereby preventing a sign or symptom in the subject that would benefit from reduction in ABLIM3 expression. Exemplary PTSD signs or symptoms include anxiety, fear, agitation, depression, distress, hostility, vivid flashbacks, insomnia, nightmares, social isolation, and physical sensations such as pain, sweating, nausea, and trembling. Exemplary age-related memory loss signs and symptoms include memory loss, frequently losing or misplacing things, frequently forgetting conversations, appointments, and events, difficulting remembering names, difficulty following a conversation, and difficulty coming up with the desired words.

[0533] Another aspect of the disclosure relates to a method of preventing a subject from having PTSD or age-related memory loss, comprising administering to the subject a therapeutically effective amount of the double-stranded ABLIM3-targeting RNAi agent of the disclosure, thereby preventing the subject from having PTSD or age-related memory loss.

[0534] In one embodiment, the double-stranded RNAi agent is administered intrathecally. By intrathecal administration of the double-stranded RNAi agent, the method can reduce the expression of an ABLIM3 target gene in a brain (e.g., hippocampus and cerebrum).

[0535] For ease of exposition the formulations, compositions and methods in this section are discussed largely with regard to modified siRNA compounds. It may be understood, however, that these formulations, compositions and methods can be practiced with other siRNA compounds, e.g., unmodified siRNA compounds, and such practice is within the disclosure. A composition that includes an RNAi agent can be delivered to a subject by a variety of routes. Exemplary routes include: intrathecal, intravenous, topical, rectal, anal, vaginal, nasal, pulmonary, and ocular.

[0536] The RNAi agents of the disclosure can be incorporated into pharmaceutical compositions suitable for administration. Such compositions typically include one or more species of RNAi agent and a pharmaceutically acceptable carrier. As used herein the language “pharmaceutically acceptable carrier” is intended to include any and all solvents, dispersion media, coatings, antibacterial and antifungal agents, isotonic and absorption delaying agents, and the like, compatible with pharmaceutical administration. The use of such media and agents for pharmaceutically active substances is well known in the art. Except insofar as any conventional media or agent is incompatible with the active compound, use thereof in the compositions is contemplated. Supplementary active compounds can also be incorporated into the compositions.

[0537] The pharmaceutical compositions of the present disclosure may be administered in a number of ways depending upon whether local or systemic treatment is desired and upon the area to be treated. Administration may be topical (including ophthalmic, vaginal, rectal, intranasal, transdermal), intrathecal, oral, or parenteral. Parenteral administration includes intravenous drip, subcutaneous, intraperitoneal or intramuscular injection, or intrathecal or intraventricular administration.

[0538] The route and site of administration may be chosen to enhance targeting. For example, to target neural or spinal tissue, intrathecal injection would be a logical choice. Lung cells might be targeted by administering the RNAi agent in aerosol form. The vascular endothelial cells could be targeted by coating a balloon catheter with the RNAi agent and mechanically introducing the RNA.

[0539] Formulations for topical administration may include transdermal patches, ointments, lotions, creams, gels, drops, suppositories, sprays, liquids, and powders. Conventional pharmaceutical carriers, aqueous, powder or oily bases, thickeners and the like may be necessary or desirable. Coated condoms, gloves and the like may also be useful.

[0540] Compositions for oral administration include powders or granules, suspensions or solutions in water, syrups, elixirs or non-aqueous media, tablets, capsules, lozenges, or troches. In the case of tablets, carriers that can be used include lactose, sodium citrate and salts of phosphoric acid. Various disintegrants such as starch, and lubricating agents such as magnesium stearate, sodium lauryl sulfate and talc, are commonly used in tablets. For oral administration in capsule form, useful diluents are lactose and high molecular weight polyethylene glycols. When aqueous suspensions are required for oral use, the nucleic acid compositions can be combined with emulsifying and suspending agents. If desired, certain sweetening or flavoring agents can be added.

[0541] Compositions for intrathecal or intraventricular administration may include sterile aqueous solutions which may also contain buffers, diluents, and other suitable additives.

[0542] Formulations for parenteral administration may include sterile aqueous solutions which may also contain buffers, diluents, and other suitable additives. Intraventricular injection may be facilitated by an intraventricular catheter, for example, attached to a reservoir. For intravenous use, the total concentration of solutes may be controlled to render the preparation isotonic.

[0543] In one embodiment, the administration of the siRNA compound. e.g., a double-stranded siRNA compound, or siRNA compound, composition is parenteral, e.g., intravenous (e.g., as a bolus or as a diffusible infusion), intradermal, intraperitoneal, intramuscular, intrathecal, intraventricular, intracranial, subcutaneous, transmucosal, buccal, sublingual, endoscopic, rectal, oral, vaginal, topical, pulmonary, intranasal, urethral, or ocular. Administration can be provided by the subject or by another person, e.g., a health care provider. The medication can be provided in measured doses or in a dispenser which delivers a metered dose. Selected modes of delivery are discussed in more detail below.

### A. Intrathecal Administration.

[0544] In one embodiment, the double-stranded RNAi agent is delivered by intrathecal injection (i.e., injection into the spinal fluid which bathes the brain and spinal cord tissue). Intrathecal injection of RNAi agents into the spinal fluid can be performed as a bolus injection or via minipumps which can be implanted beneath the skin, providing a regular and constant delivery of siRNA into the spinal fluid. The circulation of the spinal fluid from the choroid plexus, where it is produced, down around the spinal cord and dorsal root ganglia and subsequently up past the cerebellum and over the cortex to the arachnoid granulations, where the fluid can exit the CNS, that, depending upon size, stability, and solubility of the compounds injected, molecules delivered intrathecally could hit targets throughout the entire CNS.

[0545] In some embodiments, the intrathecal administration is via a pump. The pump may be a surgically implanted osmotic pump. In one embodiment, the osmotic pump is implanted into the subarachnoid space of the spinal canal to facilitate intrathecal administration.

[0546] In some embodiments, the intrathecal administration is via an intrathecal delivery system for a pharmaceutical including a reservoir containing a volume of the pharmaceutical agent, and a pump configured to deliver a portion of the pharmaceutical agent contained in the reservoir. More details about this intrathecal delivery system may be found in WO 2015/116658, which is incorporated by reference in its entirety.

[0547] The amount of intrathecally injected RNAi agents may vary from one target gene to another target gene and the appropriate amount that has to be applied may have to be determined individually for each target gene. Typically, this amount ranges from 10 μg to 2 mg, preferably 50 μg to 1500 μg, more preferably 100 μg to 1000 μg.

### B. Vector Encoded RNAi Agents of the Disclosure

[0548] RNAi agents targeting the ABLIM3 gene can be expressed from transcription units inserted into DNA or RNA vectors (see, e.g., Couture, A, et al., TIG. (1996), 12:5-10; WO 00/22113, WO 00/22114, and U.S. Pat. No. 6,054,299). Expression is preferably sustained (months or longer), depending upon the specific construct used and the target tissue or cell type. These transgenes can be introduced as a linear construct, a circular plasmid, or a viral vector, which can be an integrating or non-integrating vector. The transgene can also be constructed to permit it to be inherited as an extrachromosomal plasmid (Gassmann, et al., (1995) Proc. Natl. Acad. Sci. USA 92:1292).

[0549] The individual strand or strands of an RNAi agent can be transcribed from a promoter on an expression vector. Where two separate strands are to be expressed to generate, for example, a dsRNA, two separate expression vectors can be co-introduced (e.g., by transfection or infection) into a target cell. Alternatively, each individual strand of a dsRNA can be transcribed by promoters both of which are located on the same expression plasmid. In one embodiment, a dsRNA is expressed as inverted repeat polynucleotides joined by a linker polynucleotide sequence such that the dsRNA has a stem and loop structure.

[0550] RNAi agent expression vectors are generally DNA plasmids or viral vectors. Expression vectors compatible with eukaryotic cells, preferably those compatible with vertebrate cells, can be used to produce recombinant constructs for the expression of an RNAi agent as described herein. Delivery of RNAi agent expressing vectors can be systemic, such as by intravenous or intramuscular administration, by administration to target cells ex-planted from the patient followed by reintroduction into the patient, or by any other means that allows for introduction into a desired target cell.

[0551] Viral vector systems which can be utilized with the methods and compositions described herein include, but are not limited to, (a) adenovirus vectors; (b) retrovirus vectors, including but not limited to lentiviral vectors, moloney murine leukemia virus, etc.; (c) adeno-associated virus vectors; (d) herpes simplex virus vectors; (e) SV 40 vectors: (f) polyoma virus vectors; (g) papilloma virus vectors; (h) picornavirus vectors; (i) pox virus vectors such as an orthopox, e.g., vaccinia virus vectors or avipox, e.g. canary pox or fowl pox; and (j) a helper-dependent or gutless adenovirus. Replication-defective viruses can also be advantageous. Different vectors will or will not become incorporated into the cells' genome. The constructs can include viral sequences for transfection, if desired. Alternatively, the construct can be incorporated into vectors capable of episomal replication, e.g. EPV and EBV vectors. Constructs for the recombinant expression of an RNAi agent will generally require regulatory elements, e.g., promoters, enhancers, etc., to ensure the expression of the RNAi agent in target cells. Other aspects to consider for vectors and constructs are known in the art.

### VI. Pharmaceutical Compositions of the Invention

[0552] The present disclosure also includes pharmaceutical compositions and formulations which include the RNAi agents of the disclosure. In one embodiment, provided herein are pharmaceutical compositions containing an RNAi agent, as described herein, and a pharmaceutically acceptable carrier. The pharmaceutical compositions containing the RNAi agent are useful for treating a disease or condition treatable by reduction or inhibition of the expression or activity of ABLIM3, e.g., ABLIM3-associated disease, such PTSD or age-related memory loss.

[0553] In some embodiments, the pharmaceutical compositions of the invention are sterile. In another embodiment, the pharmaceutical compositions of the invention are pyrogen free.

[0554] Such pharmaceutical compositions are formulated based on the mode of delivery. One example is compositions that are formulated for systemic administration via parenteral delivery, e.g., by intravenous (IV), intramuscular (IM), or for subcutaneous (subQ) delivery. Another example is compositions that are formulated for direct delivery into the CNS, e.g., by intrathecal or intravitreal routes of injection, optionally by infusion into the brain (e.g., striatum), such as by continuous pump infusion.

[0555] The pharmaceutical compositions of the disclosure may be administered in dosages sufficient to inhibit expression of an ABLIM3 gene. In general, a suitable dose of an RNAi agent of the disclosure will be in the range of about 0.001 to about 200.0 milligrams per kilogram body weight of the recipient per day, generally in the range of about 1 to 50 mg per kilogram body weight per day.

[0556] A repeat-dose regimen may include administration of a therapeutic amount of an RNAi agent on a regular basis, such as monthly to once every six months. In certain embodiments, the RNAi agent is administered about once per quarter (i.e., about once every three months) to about twice per year.

[0557] After an initial treatment regimen (e.g., loading dose), the treatments can be administered on a less frequent basis.

[0558] In other embodiments, a single dose of the pharmaceutical compositions can be long lasting, such that subsequent doses are administered at not more than 1, 2, 3, or 4 or more month intervals. In some embodiments of the disclosure, a single dose of the pharmaceutical compositions of the disclosure is administered once per month. In other embodiments of the disclosure, a single dose of the pharmaceutical compositions of the disclosure is administered once per quarter to twice per year.

[0559] The skilled artisan will appreciate that certain factors can influence the dosage and timing required to effectively treat a subject, including but not limited to the severity of the disease or disorder, previous treatments, the general health or age of the subject, and other diseases present. Moreover, treatment of a subject with a therapeutically effective amount of a composition can include a single treatment or a series of treatments.

[0560] Advances in genetics have generated a number of rodent models for the study of various human diseases, including PTSD or age-related memory loss, that would benefit from reduction in the expression of ABLIM3. Such models can be used for in vivo testing of RNAi agents, as well as for determining a therapeutically effective dose. Suitable rodent models are known in the art and include, for example, those described in, for example, Borhgans and Homberg (2015) World J. Psychiatry 5(4):387-96. The pharmaceutical compositions of the present disclosure can be administered in a number of ways depending upon whether local or systemic treatment is desired and upon the area to be treated. Administration can be topical (e.g., by a transdermal patch), pulmonary, e.g., by inhalation or insufflation of powders or aerosols, including by nebulizer; intratracheal, intranasal, epidermal and transdermal, oral or parenteral. Parenteral administration includes intravenous, intraarterial, subcutaneous, intraperitoneal or intramuscular injection or infusion; subdermal, e.g., via an implanted device; or intracranial, e.g., by intraparenchymal, intrathecal or intraventricular, administration.

[0561] The RNAi agents can be delivered in a manner to target a particular tissue, such as the CNS (e.g., neuronal, glial or vascular tissue of the brain).

[0562] Pharmaceutical compositions and formulations for topical administration can include transdermal patches, ointments, lotions, creams, gels, drops, suppositories, sprays, liquids and powders. Conventional pharmaceutical carriers, aqueous, powder or oily bases, thickeners and the like can be necessary or desirable. Coated condoms, gloves and the like can also be useful. Suitable topical formulations include those in which the RNAi agents featured in the disclosure are in admixture with a topical delivery agent such as lipids, liposomes, fatty acids, fatty acid esters, steroids, chelating agents and surfactants. Suitable lipids and liposomes include neutral (e.g., dioleoylphosphatidyl DOPE ethanolamine, dimyristoylphosphatidyl choline DMPC, distearolyphosphatidyl choline) negative (e.g., dimyristoylphosphatidyl glycerol DMPG) and cationic (e.g., dioleoyltetramethylaminopropyl DOTAP and dioleoylphosphatidyl ethanolamine DOTMA). RNAi agents featured in the disclosure can be encapsulated within liposomes or can form complexes thereto, in particular to cationic liposomes. Alternatively, RNAi agents can be complexed to lipids, in particular to cationic lipids. Suitable fatty acids and esters include but are not limited to arachidonic acid, oleic acid, eicosanoic acid, lauric acid, caprylic acid, capric acid, myristic acid, palmitic acid, stearic acid, linoleic acid, linolenic acid, dicaprate, tricaprate, monoolein, dilaurin, glyceryl 1-monocaprate, 1-dodecylazacycloheptan-2-one, an acylcarnitine, an acylcholine, or a C₁₋₂₀ alkyl ester (e.g., isopropylmyristate TPM), monoglyceride, diglyceride or pharmaceutically acceptable salt thereof. Topical formulations are described in detail in U.S. Pat. No. 6,747,014, which is incorporated herein by reference.

### A. RNAI Agent Formulations Comprising Membranous Molecular Assemblies

[0563] An RNAi agent for use in the compositions and methods of the disclosure can be formulated for delivery in a membranous molecular assembly, e.g., a liposome or a micelle. As used herein, the term “liposome” refers to a vesicle composed of amphiphilic lipids arranged in at least one bilayer, e.g., one bilayer or a plurality of bilayers. Liposomes include unilamellar and multilamellar vesicles that have a membrane formed from a lipophilic material and an aqueous interior. The aqueous portion contains the RNAi agent composition. The lipophilic material isolates the aqueous interior from an aqueous exterior, which typically does not include the RNAi agent composition, although in some examples, it may. Liposomes are useful for the transfer and delivery of active ingredients to the site of action. Because the liposomal membrane is structurally similar to biological membranes, when liposomes are applied to a tissue, the liposomal bilayer fuses with bilayer of the cellular membranes. As the merging of the liposome and cell progresses, the internal aqueous contents that include the RNAi agent are delivered into the cell where the RNAi agent can specifically bind to a target RNA and can mediate RNAi. In some cases, the liposomes are also specifically targeted, e.g., to direct the RNAi agent to particular cell types.

[0564] A liposome containing an RNAi agent can be prepared by a variety of methods. In one example, the lipid component of a liposome is dissolved in a detergent so that micelles are formed with the lipid component. For example, the lipid component can be an amphipathic cationic lipid or lipid conjugate. The detergent can have a high critical micelle concentration and may be nonionic. Exemplary detergents include cholate, CHAPS, octylglucoside, deoxycholate, and lauroyl sarcosine. The RNAi agent preparation is then added to the micelles that include the lipid component. The cationic groups on the lipid interact with the RNAi agent and condense around the RNAi agent to form a liposome. After condensation, the detergent is removed, e.g., by dialysis, to yield a liposomal preparation of RNAi agent.

[0565] If necessary a carrier compound that assists in condensation can be added during the condensation reaction, e.g., by controlled addition. For example, the carrier compound can be a polymer other than a nucleic acid (e.g., spermine or spermidine). pH can also be adjusted to favor condensation.

[0566] Methods for producing stable polynucleotide delivery vehicles, which incorporate a polynucleotide/cationic lipid complex as structural components of the delivery vehicle, are further described in, e.g., WO 96/37194, the entire contents of which are incorporated herein by reference. Liposome formation can also include one or more aspects of exemplary methods described in Felgner, P. L. et al., (1987) Proc. Natl. Acad. Sci. USA 8:7413-7417; U.S. Pat. Nos. 4,897,355; 5,171,678; Bangham et al., (1965) M. Mol. Biol. 23:238; Olson et al., (1979) Biochim. Biophys. Acta 557:9; Szoka et al., (1978) Proc. Natl. Acad. Sci. 75: 4194; Mayhew et al., (1984) Biochim. Biophys. Acta 775:169; Kim et al., (1983) Biochim. Biophys. Acta 728:339; and Fukunaga et al., (1984) Endocrinol. 115:757. Commonly used techniques for preparing lipid aggregates of appropriate size for use as delivery vehicles include sonication and freeze-thaw plus extrusion (see, e.g., Mayer et al., (1986) Biochim. Biophys. Acta 858:161. Microfluidization can be used when consistently small (50 to 200 nm) and relatively uniform aggregates are desired (Mayhew et al., (1984) Biochim. Biophys. Acta 775:169. These methods are readily adapted to packaging RNAi agent preparations into liposomes.

[0567] Liposomes fall into two broad classes. Cationic liposomes are positively charged liposomes which interact with the negatively charged nucleic acid molecules to form a stable complex. The positively charged nucleic acid/liposome complex binds to the negatively charged cell surface and is internalized in an endosome. Due to the acidic pH within the endosome, the liposomes are ruptured, releasing their contents into the cell cytoplasm (Wang et al. (1987) Biochem. Biophys. Res. Commun., 147:980-985).

[0568] Liposomes, which are pH-sensitive or negatively charged, entrap nucleic acids rather than complex with them. Since both the nucleic acid and the lipid are similarly charged, repulsion rather than complex formation occurs. Nevertheless, some nucleic acid is entrapped within the aqueous interior of these liposomes. pH sensitive liposomes have been used to deliver nucleic acids encoding the thymidine kinase gene to cell monolayers in culture. Expression of the exogenous gene was detected in the target cells (Zhou et al. (1992) Journal of Controlled Release, 19:269-274).

[0569] One major type of liposomal composition includes phospholipids other than naturally-derived phosphatidylcholine. Neutral liposome compositions, for example, can be formed from dimyristoyl phosphatidylcholine (DMPC) or dipalmitoyl phosphatidylcholine (DPPC). Anionic liposome compositions generally are formed from dimyristoyl phosphatidylglycerol, while anionic fusogenic liposomes are formed primarily from dioleoyl phosphatidylethanolamine (DOPE). Another type of liposomal composition is formed from phosphatidylcholine (PC) such as, for example, soybean PC, and egg PC. Another type is formed from mixtures of phospholipid or phosphatidylcholine or cholesterol.

[0570] Examples of other methods to introduce liposomes into cells in vitro and in vivo include U.S. Pat. Nos. 5,283,185; 5,171,678; WO 94/00569; WO 93/24640; WO 91/16024; Felgner, (1994) J. Biol. Chem. 269:2550; Nabel, (1993) Proc. Natl. Acad. Sci. 90:11307; Nabel, (1992) Human Gene Ther. 3:649; Gershon, (1993) Biochem. 32:7143; and Strauss, (1992) EMBO J. 11:417.

[0571] Non-ionic liposomal systems have also been examined to determine their utility in the delivery of drugs to the skin, in particular systems comprising non-ionic surfactant and cholesterol. Non-ionic liposomal formulations comprising Novasome™ I (glyceryl dilaurate/cholesterol/polyoxyethylene-10-stearyl ether) and Novasome™ II (glyceryl distearate/cholesterol/polyoxyethylene-10-stearyl ether) were used to deliver cyclosporin-A into the dermis of mouse skin. Results indicated that such non-ionic liposomal systems were effective in facilitating the deposition of cyclosporine A into different layers of the skin (Hu et al., (1994) S.T.P.Pharma. Sci., 4(6):466).

[0572] Liposomes also include “sterically stabilized” liposomes, a term which, as used herein, refers to liposomes comprising one or more specialized lipids that, when incorporated into liposomes, result in enhanced circulation lifetimes relative to liposomes lacking such specialized lipids. Examples of sterically stabilized liposomes are those in which part of the vesicle-forming lipid portion of the liposome (A) comprises one or more glycolipids, such as monosialoganglioside GM1, or (B) is derivatized with one or more hydrophilic polymers, such as a polyethylene glycol (PEG) moiety. While not wishing to be bound by any particular theory, it is thought in the art that, at least for sterically stabilized liposomes containing gangliosides, sphingomyelin, or PEG-derivatized lipids, the enhanced circulation half-life of these sterically stabilized liposomes derives from a reduced uptake into cells of the reticuloendothelial system (RES) (Allen et al., (1987) FEBS Letters, 223:42; Wu et al., (1993) Cancer Research, 53:3765).

[0573] Various liposomes comprising one or more glycolipids are known in the art. Papahadjopoulos et al. (Ann. N.Y. Acad. Sci., (1987), 507:64) reported the ability of monosialoganglioside GM1, galactocerebroside sulfate and phosphatidylinositol to improve blood half-lives of liposomes. These findings were expounded upon by Gabizon et al. (Proc. Natl. Acad. Sci. U.S.A., (1988), 85:6949). U.S. Pat. No. 4,837,028 and WO 88/04924, both to Allen et al., disclose liposomes comprising (1) sphingomyelin and (2) the ganglioside GM1 or a galactocerebroside sulfate ester. U.S. Pat. No. 5,543,152 (Webb et al.) discloses liposomes comprising sphingomyelin. Liposomes comprising 1,2-sn-dimyristoylphosphatidylcholine are disclosed in WO 97/13499 (Lim et al).

[0574] In one embodiment, cationic liposomes are used. Cationic liposomes possess the advantage of being able to fuse to the cell membrane. Non-cationic liposomes, although not able to fuse as efficiently with the plasma membrane, are taken up by macrophages in vivo and can be used to deliver RNAi agents to macrophages.

[0575] Further advantages of liposomes include: liposomes obtained from natural phospholipids are biocompatible and biodegradable; liposomes can incorporate a wide range of water and lipid soluble drugs; liposomes can protect encapsulated RNAi agents in their internal compartments from metabolism and degradation (Rosoff, in “Pharmaceutical Dosage Forms,” Lieberman, Rieger and Banker (Eds.), 1988, volume 1, p. 245). Important considerations in the preparation of liposome formulations are the lipid surface charge, vesicle size and the aqueous volume of the liposomes.

[0576] A positively charged synthetic cationic lipid, N-[1-(2,3-dioleyloxy)propyl]-N,N,N-trimethylammonium chloride (DOTMA) can be used to form small liposomes that interact spontaneously with nucleic acid to form lipid-nucleic acid complexes which are capable of fusing with the negatively charged lipids of the cell membranes of tissue culture cells, resulting in delivery of RNAi agent (see, e.g., Felgner, P. L. et al., (1987) Proc. Natl. Acad. Sci. USA 8:7413-7417, and U.S. Pat. No. 4,897,355 for a description of DOTMA and its use with DNA).

[0577] A DOTMA analogue, 1,2-bis(oleoyloxy)-3-(trimethylammonia)propane (DOTAP) can be used in combination with a phospholipid to form DNA-complexing vesicles. Lipofectin™ Bethesda Research Laboratories, Gaithersburg, Md.) is an effective agent for the delivery of highly anionic nucleic acids into living tissue culture cells that comprise positively charged DOTMA liposomes which interact spontaneously with negatively charged polynucleotides to form complexes. When enough positively charged liposomes are used, the net charge on the resulting complexes is also positive. Positively charged complexes prepared in this way spontaneously attach to negatively charged cell surfaces, fuse with the plasma membrane, and efficiently deliver functional nucleic acids into, for example, tissue culture cells. Another commercially available cationic lipid, 1,2-bis(oleoyloxy)-3,3-(trimethylammonia)propane (“DOTAP”) (Boehringer Mannheim, Indianapolis, Indiana) differs from DOTMA in that the oleoyl moieties are linked by ester, rather than ether linkages.

[0578] Other reported cationic lipid compounds include those that have been conjugated to a variety of moieties including, for example, carboxyspermine which has been conjugated to one of two types of lipids and includes compounds such as 5-carboxyspermylglycine dioctaoleoylamide (“DOGS”) (Transfectam™, Promega, Madison, Wisconsin) and dipalmitoylphosphatidylethanolamine 5-carboxyspermyl-amide (“DPPES”) (see, e.g., U.S. Pat. No. 5,171,678).

[0579] Another cationic lipid conjugate includes derivatization of the lipid with cholesterol (“DC-Chol”) which has been formulated into liposomes in combination with DOPE (See, Gao, X. and Huang, L., (1991) Biochim. Biophys. Res. Commun. 179:280). Lipopolylysine, made by conjugating polylysine to DOPE, has been reported to be effective for transfection in the presence of serum (Zhou, X. et al., (1991) Biochim. Biophys. Acta 1065:8). For certain cell lines, these liposomes containing conjugated cationic lipids, are said to exhibit lower toxicity and provide more efficient transfection than the DOTMA-containing compositions. Other commercially available cationic lipid products include DMRIE and DMRIE-HP (Vical, La Jolla, California) and Lipofectamine (DOSPA) (Life Technology, Inc., Gaithersburg, Maryland). Other cationic lipids suitable for the delivery of oligonucleotides are described in WO 98/39359 and WO 96/37194.

[0580] Liposomal formulations are particularly suited for topical administration; liposomes present several advantages over other formulations. Such advantages include reduced side effects related to high systemic absorption of the administered drug, increased accumulation of the administered drug at the desired target, and the ability to administer RNAi agent into the skin. In some implementations, liposomes are used for delivering RNAi agent to epidermal cells and also to enhance the penetration of RNAi agent into dermal tissues, e.g., into skin. For example, the liposomes can be applied topically. Topical delivery of drugs formulated as liposomes to the skin has been documented (see, e.g., Weiner et al., (1992) Journal of Drug Targeting, vol. 2, 405-410 and du Plessis et al., (1992) Antiviral Research, 18:259-265; Mannino, R. J. and Fould-Fogerite, S., (1998) Biotechniques 6:682-690; Itani, T. et al., (1987) Gene 56:267-276; Nicolau, C. et al. (1987) Meth. Enzymol. 149:157-176; Straubinger, R. M. and Papahadjopoulos, D. (1983)Meth. Enzymol. 101:512-527; Wang, C. Y. and Huang, L., (1987) Proc. Natl. Acad. Sci. USA 84:7851-7855).

[0581] Non-ionic liposomal systems have also been examined to determine their utility in the delivery of drugs to the skin, in particular systems comprising non-ionic surfactant and cholesterol. Non-ionic liposomal formulations comprising Novasome I (glyceryl dilaurate/cholesterol/polyoxyethylene-10-stearyl ether) and Novasome II (glyceryl distearate/cholesterol/polyoxyethylene-10-stearyl ether) were used to deliver a drug into the dermis of mouse skin. Such formulations with RNAi agent are useful for treating a dermatological disorder.

[0582] Liposomes that include RNAi agents can be made highly deformable. Such deformability can enable the liposomes to penetrate through pore that are smaller than the average radius of the liposome. For example, transfersomes are a type of deformable liposomes. Transfersomes can be made by adding surface edge activators, usually surfactants, to a standard liposomal composition. Transfersomes that include RNAi agent can be delivered, for example, subcutaneously by infection in order to deliver RNAi agent to keratinocytes in the skin. In order to cross intact mammalian skin, lipid vesicles must pass through a series of fine pores, each with a diameter less than 50 nm, under the influence of a suitable transdermal gradient. In addition, due to the lipid properties, these transfersomes can be self-optimizing (adaptive to the shape of pores, e.g., in the skin), self-repairing, and can frequently reach their targets without fragmenting, and often self-loading.

[0583] Other formulations amenable to the present disclosure are described in PCT application number PCT/US2008/088588, filed Dec. 13, 2008; PCT/US2008/088587, filed Dec. 13, 2008; PCT/US2009/041442, filed Apr. 22, 2009; and PCT/US2007/080331, filed Oct. 3, 2007.

[0584] Transfersomes, yet another type of liposomes, are highly deformable lipid aggregates which are attractive candidates for drug delivery vehicles. Transfersomes can be described as lipid droplets which are so highly deformable that they are easily able to penetrate through pores which are smaller than the droplet. Transfersomes are adaptable to the environment in which they are used, e.g., they are self-optimizing (adaptive to the shape of pores in the skin), self-repairing, frequently reach their targets without fragmenting, and often self-loading. To make transfersomes it is possible to add surface edge-activators, usually surfactants, to a standard liposomal composition. Transfersomes have been used to deliver serum albumin to the skin. The transfersome-mediated delivery of serum albumin has been shown to be as effective as subcutaneous injection of a solution containing serum albumin.

[0585] Surfactants find wide application in formulations such as those described herein, particularly in emulsions (including microemulsions) and liposomes. The most common way of classifying and ranking the properties of the many different types of surfactants, both natural and synthetic, is by the use of the hydrophile/lipophile balance (HLB). The nature of the hydrophilic group (also known as the “head”) provides the most useful means for categorizing the different surfactants used in formulations (Rieger, in Pharmaceutical Dosage Forms, Marcel Dekker, Inc., New York, N.Y., 1988, p. 285).

[0586] If the surfactant molecule is not ionized, it is classified as a nonionic surfactant. Nonionic surfactants find wide application in pharmaceutical and cosmetic products and are usable over a wide range of pH values. In general, their HLB values range from 2 to about 18 depending on their structure. Nonionic surfactants include nonionic esters such as ethylene glycol esters, propylene glycol esters, glyceryl esters, polyglyceryl esters, sorbitan esters, sucrose esters, and ethoxylated esters. Nonionic alkanolamides and ethers such as fatty alcohol ethoxylates, propoxylated alcohols, and ethoxylated/propoxylated block polymers are also included in this class. The polyoxyethylene surfactants are the most popular members of the nonionic surfactant class.

[0587] If the surfactant molecule carries a negative charge when it is dissolved or dispersed in water, the surfactant is classified as anionic. Anionic surfactants include carboxylates such as soaps, acyl lactylates, acyl amides of amino acids, esters of sulfuric acid such as alkyl sulfates and ethoxylated alkyl sulfates, sulfonates such as alkyl benzene sulfonates, acyl isethionates, acyl taurates and sulfosuccinates, and phosphates. The most important members of the anionic surfactant class are the alkyl sulfates and the soaps.

[0588] If the surfactant molecule carries a positive charge when it is dissolved or dispersed in water, the surfactant is classified as cationic. Cationic surfactants include quaternary ammonium salts and ethoxylated amines. The quaternary ammonium salts are the most used members of this class.

[0589] If the surfactant molecule has the ability to carry either a positive or negative charge, the surfactant is classified as amphoteric. Amphoteric surfactants include acrylic acid derivatives, substituted alkylamides, N-alkylbetaines and phosphatides. The use of surfactants in drug products, formulations and in emulsions has been reviewed (Rieger, in Pharmaceutical Dosage Forms, Marcel Dekker, Inc., New York, N.Y., 1988, p. 285).

[0590] The RNAi agent for use in the methods of the disclosure can also be provided as micellar formulations. “Micelles” are defined herein as a particular type of molecular assembly in which amphipathic molecules are arranged in a spherical structure such that all the hydrophobic portions of the molecules are directed inward, leaving the hydrophilic portions in contact with the surrounding aqueous phase. The converse arrangement exists if the environment is hydrophobic.

[0591] A mixed micellar formulation suitable for delivery through transdermal membranes may be prepared by mixing an aqueous solution of the siRNA composition, an alkali metal C₈ to C₂₂ alkyl sulphate, and a micelle forming compounds. Exemplary micelle forming compounds include lecithin, hyaluronic acid, pharmaceutically acceptable salts of hyaluronic acid, glycolic acid, lactic acid, chamomile extract, cucumber extract, oleic acid, linoleic acid, linolenic acid, monoolein, monooleates, monolaurates, borage oil, evening of primrose oil, menthol, trihydroxy oxo cholanyl glycine and pharmaceutically acceptable salts thereof, glycerin, polyglycerin, lysine, polylysine, triolein, polyoxyethylene ethers and analogues thereof, polidocanol alkyl ethers and analogues thereof, chenodeoxycholate, deoxycholate, and mixtures thereof. The micelle forming compounds may be added at the same time or after addition of the alkali metal alkyl sulphate. Mixed micelles will form with substantially any kind of mixing of the ingredients but vigorous mixing in order to provide smaller size micelles.

[0592] In one method a first micellar composition is prepared which contains the siRNA composition and at least the alkali metal alkyl sulphate. The first micellar composition is then mixed with at least three micelle forming compounds to form a mixed micellar composition. In another method, the micellar composition is prepared by mixing the siRNA composition, the alkali metal alkyl sulphate and at least one of the micelle forming compounds, followed by addition of the remaining micelle forming compounds, with vigorous mixing.

[0593] Phenol or m-cresol may be added to the mixed micellar composition to stabilize the formulation and protect against bacterial growth. Alternatively, phenol or m-cresol may be added with the micelle forming ingredients. An isotonic agent such as glycerin may also be added after formation of the mixed micellar composition.

[0594] For delivery of the micellar formulation as a spray, the formulation can be put into an aerosol dispenser and the dispenser is charged with a propellant. The propellant, which is under pressure, is in liquid form in the dispenser. The ratios of the ingredients are adjusted so that the aqueous and propellant phases become one, i.e., there is one phase. If there are two phases, it is necessary to shake the dispenser prior to dispensing a portion of the contents, e.g., through a metered valve. The dispensed dose of pharmaceutical agent is propelled from the metered valve in a fine spray.

[0595] Propellants may include hydrogen-containing chlorofluorocarbons, hydrogen-containing fluorocarbons, dimethyl ether and diethyl ether. In certain embodiments, HFA 134a (1,1,1,2 tetrafluoroethane) may be used.

[0596] The specific concentrations of the essential ingredients can be determined by relatively straightforward experimentation. For absorption through the oral cavities, it is often desirable to increase, e.g., at least double or triple, the dosage for through injection or administration through the gastrointestinal tract.

### B. Lipid Particles

[0597] RNAi agents, e.g., dsRNAs of in the disclosure may be fully encapsulated in a lipid formulation, e.g., a LNP, or other nucleic acid-lipid particle.

[0598] As used herein, the term “LNP” refers to a stable nucleic acid-lipid particle. LNPs typically contain a cationic lipid, a non-cationic lipid, and a lipid that prevents aggregation of the particle (e.g., a PEG-lipid conjugate). LNPs are extremely useful for systemic applications, as they exhibit extended circulation lifetimes following intravenous (i.v.) injection and accumulate at distal sites (e.g., sites physically separated from the administration site). LNPs include “pSPLP,” which include an encapsulated condensing agent-nucleic acid complex as set forth in WO 00/03683. The particles of the present disclosure typically have a mean diameter of about 50 nm to about 150 n, more typically about 60 nm to about 130 inn, more typically about 70 nm to about 110 nm, most typically about 70 nm to about 90 inn, and are substantially nontoxic. In addition, the nucleic acids when present in the nucleic acid-lipid particles of the present disclosure are resistant in aqueous solution to degradation with a nuclease. Nucleic acid-lipid particles and their method of preparation are disclosed in, e.g., U.S. Pat. Nos. 5,976,567; 5,981,501; 6,534,484; 6,586,410; 6,815,432; United States Patent Publication No. 2010/0324120 and WO 96/40964.

[0599] In one embodiment, the lipid to drug ratio (mass/mass ratio) (e.g., lipid to dsRNA ratio) will be in the range of from about 1:1 to about 50:1, from about 1:1 to about 25:1, from about 3:1 to about 15:1, from about 4:1 to about 10:1, from about 5:1 to about 9:1, or about 6:1 to about 9:1. Ranges intermediate to the above recited ranges are also contemplated to be part of the disclosure.

[0600] Certain specific LNP formulations for delivery of RNAi agents have been described in the art, including, e.g., “LNP01” formulations as described in, e.g., WO 2008/042973, which is hereby incorporated by reference.

[0601] Additional exemplary lipid-dsRNA formulations are identified in Table 1 below.

TABLE 1

| | | cationic lipid/non-cationic |
|---|---|---|
| | | lipid/cholesterol/PEG-lipid conjugate |
| | Ionizable/Cationic Lipid | Lipid:siRNA ratio |
| SNALP-1 | 1,2-Dilinolenyloxy-N,N- | DLinDMA/DPPC/Cholesterol/PEG- |
| | dimethylaminopropane (DLinDMA) | cDMA |
| | | (57.1/7.1/34.4/1.4) |
| | | lipid:siRNA ~7:1 |
| 2-XTC | 2,2-Dilinoleyl-4-dimethylaminoethyl-[1,3]- | XTC/DPPC/Cholesterol/PEG-cDMA |
| | dioxolane (XTC) | 57.1/7.1/34.4/1.4 |
| | | lipid:siRNA ~7:1 |
| LNP05 | 2,2-Dilinoleyl-4-dimethylaminoethyl-[1,3]- | XTC/DSPC/Cholesterol/PEG-DMG |
| | dioxolane (XTC) | 57.5/7.5/31.5/3.5 |
| | | lipid:siRNA ~6:1 |
| LNP06 | 2,2-Dilinoleyl-4-dimethylaminoethyl-[1,3]- | XTC/DSPC/Cholesterol/PEG-DMG |
| | dioxolane (XTC) | 57.5/7.5/31.5/3.5 |
| | | lipid:siRNA ~11:1 |
| LNP07 | 2,2-Dilinoleyl-4-dimethylaminoethyl-[1,3]- | XTC/DSPC/Cholesterol/PEG-DMG |
| | dioxolane (XTC) | 60/7.5/31/1.5, |
| | | lipid:siRNA ~6:1 |
| LNP08 | 2,2-Dilinoleyl-4-dimethylaminoethyl-[1,3]- | XTC/DSPC/Cholesterol/PEG-DMG |
| | dioxolane (XTC) | 60/7.5/31/1.5, |
| | | lipid:siRNA ~11:1 |
| LNP09 | 2,2-Dilinoleyl-4-dimethylaminoethyl-[1,3]- | XTC/DSPC/Cholesterol/PEG-DMG |
| | dioxolane (XTC) | 50/10/38.5/1.5 |
| | | Lipid:siRNA 10:1 |
| LNP10 | (3aR,5s,6aS)-N,N-dimethyl-2,2- | ALN100/DSPC/Cholesterol/PEG- |
| | di((9Z,12Z)-octadeca-9,12- | DMG |
| | dienyl)tetrahydro-3aH- | 50/10/38.5/1.5 |
| | cyclopenta[d][1,3]dioxol-5-amine | Lipid:siRNA 10:1 |
| | (ALN100) | |
| LNP11 | (6Z,9Z,28Z,31Z)-heptatriaconta-6,9,28,31- | MC-3/DSPC/Cholesterol/PEG-DMG |
| | tetraen-19-yl 4-(dimethylamino)butanoate | 50/10/38.5/1.5 |
| | (MC3) | Lipid:siRNA 10:1 |
| LNP12 | 1,1′-(2-(4-(2-((2-(bis(2- | Tech G1/DSPC/Cholesterol/PEG- |
| | hydroxydodecyl)amino)ethyl)(2- | DMG |
| | hydroxydodecyl)amino)ethyl)piperazin-1- | 50/10/38.5/1.5 |
| | yl)ethylazanediyl)didodecan-2-ol (Tech | Lipid:siRNA 10:1 |
| | G1) | |
| LNP13 | XTC | XTC/DSPC/Chol/PEG-DMG |
| | | 50/10/38.5/1.5 |
| | | Lipid:siRNA: 33:1 |
| LNP14 | MC3 | MC3/DSPC/Chol/PEG-DMG |
| | | 40/15/40/5 |
| | | Lipid:siRNA: 11:1 |
| LNP15 | MC3 | MC3/DSPC/Chol/PEG-DSG/GalNAc- |
| | | PEG-DSG |
| | | 50/10/35/4.5/0.5 |
| | | Lipid:siRNA: 11:1 |
| LNP16 | MC3 | MC3/DSPC/Chol/PEG-DMG |
| | | 50/10/38.5/1.5 |
| | | Lipid:siRNA: 7:1 |
| LNP17 | MC3 | MC3/DSPC/Chol/PEG-DSG |
| | | 50/10/38.5/1.5 |
| | | Lipid:siRNA: 10:1 |
| LNP18 | MC3 | MC3/DSPC/Chol/PEG-DMG |
| | | 50/10/38.5/1.5 |
| | | Lipid:siRNA: 12:1 |
| LNP19 | MC3 | MC3/DSPC/Chol/PEG-DMG |
| | | 50/10/35/5 |
| | | Lipid:siRNA: 8:1 |
| LNP20 | MC3 | MC3/DSPC/Chol/PEG-DPG |
| | | 50/10/38.5/1.5 |
| | | Lipid:siRNA: 10:1 |
| LNP21 | C12-200 | C12-200/DSPC/Chol/PEG-DSG |
| | | 50/10/38.5/1.5 |
| | | Lipid:siRNA: 7:1 |
| LNP22 | XTC | XTC/DSPC/Chol/PEG-DSG |
| | | 50/10/38.5/1.5 |
| | | Lipid:siRNA: 10:1 |

DSPC: distearoylphosphatidylcholine
DPPC: dipalmitoylphosphatidylcholine
PEG-DMG: PEG-didimyristoyl glycerol (C14-PEG, or PEG-C14) (PEG with avg mol wt of 2000)
PEG-DSG: PEG-distyryl glycerol (C18-PEG, or PEG-C18) (PEG with avg mol wt of 2000)
PEG-cDMA: PEG-carbamoyl-1,2-dimyristyloxypropylamine (PEG with avg mol wt of 2000)
SNALP (1,2-Dilinolenyloxy-N,N-dimethylaminopropane (DLinDMA)) comprising formulations are described in WO 2009/127060, which is hereby incorporated by reference.
XTC comprising formulations are described in WO 2010/088537, the entire contents of which are hereby incorporated herein by reference.
MC3 comprising formulations are described, e.g., in United States Patent Publication No. 2010/0324120, the entire contents of which are hereby incorporated by reference.
ALNY-100 comprising formulations are described in WO 2010/054406, the entire contents of which are hereby incorporated herein by reference.
C12-200 comprising formulations are described in WO 2010/129709, the entire contents of which are hereby incorporated herein by reference.

[0602] Compositions and formulations for oral administration include powders or granules, microparticulates, nanoparticulates, suspensions or solutions in water or non-aqueous media, capsules, gel capsules, sachets, tablets or minitablets. Thickeners, flavoring agents, diluents, emulsifiers, dispersing aids or binders can be desirable. In some embodiments, oral formulations are those in which dsRNAs featured in the disclosure are administered in conjunction with one or more penetration enhancer surfactants and chelators. Suitable surfactants include fatty acids or esters or salts thereof, bile acids or salts thereof. Suitable bile acids/salts include chenodeoxycholic acid (CDCA) and ursodeoxychenodeoxycholic acid (UDCA), cholic acid, dehydrocholic acid, deoxycholic acid, glucholic acid, glycholic acid, glycodeoxycholic acid, taurocholic acid, taurodeoxycholic acid, sodium tauro-24,25-dihydro-fusidate and sodium glycodihydrofusidate. Suitable fatty acids include arachidonic acid, undecanoic acid, oleic acid, lauric acid, caprylic acid, capric acid, myristic acid, palmitic acid, stearic acid, linoleic acid, linolenic acid, dicaprate, tricaprate, monoolein, dilaurin, glyceryl 1-monocaprate. 1-dodecylazacycloheptan-2-one, an acylcarnitine, an acylcholine, or a monoglyceride, a diglyceride or a pharmaceutically acceptable salt thereof (e.g., sodium). In some embodiments, combinations of penetration enhancers are used, for example, fatty acids/salts in combination with bile acids/salts. One exemplary combination is the sodium salt of lauric acid, capric acid and UDCA. Further penetration enhancers include polyoxyethylene-9-lauryl ether, polyoxyethylene-20-cetyl ether. DsRNAs featured in the disclosure can be delivered orally, in granular form including sprayed dried particles, or complexed to form micro or nanoparticles. DsRNA complexing agents include poly-amino acids; polyimines; polyacrylates; polyalkylacrylates, polyoxethanes, polyalkylcyanoacrylates; cationized gelatins, albumins, starches, acrylates, polyethyleneglycols (PEG) and starches; polyalkylcyanoacrylates; DEAE-derivatized polyimines, pollulans, celluloses and starches. Suitable complexing agents include chitosan, N-trimethylchitosan, poly-L-lysine, polyhistidine, polyornithine, polyspermines, protamine, polyvinylpyridine, polythiodiethylaminomethylethylene P(TDAE), polyaminostyrene (e.g., p-amino), poly(methylcyanoacrylate), poly(ethylcyanoacrylate), poly(butylcyanoacrylate), poly(isobutylcyanoacrylate), poly(isohexylcynaoacrylate), DEAE-methacrylate. DEAE-hexylacrylate, DEAE-acrylamide, DEAE-albumin and DEAE-dextran, polymethylacrylate, polyhexylacrylate, poly(D,L-lactic acid), poly(DL-lactic-co-gly colic acid (PLGA), alginate, and polyethyleneglycol (PEG). Oral formulations for dsRNAs and their preparation are described in detail in U.S. Pat. No. 6,887,906, U.S. 2003/0027780, and U.S. Pat. No. 6,747,014, each of which is incorporated herein by reference.

[0603] Compositions and formulations for parenteral, intraparenchymal (into the brain), intrathecal, intraventricular or intrahepatic administration can include sterile aqueous solutions which can also contain buffers, diluents and other suitable additives such as, but not limited to, penetration enhancers, carrier compounds and other pharmaceutically acceptable carriers or excipients.

[0604] Pharmaceutical compositions of the present disclosure include, but are not limited to, solutions, emulsions, and liposome-containing formulations. These compositions can be generated from a variety of components that include, but are not limited to, preformed liquids, self-emulsifying solids and self-emulsifying semisolids. Exemplary formulations include those that target the brain when treating or preventing ABLIM3-associated diseases or disorders.

[0605] The pharmaceutical formulations of the present disclosure, which can conveniently be presented in unit dosage form, can be prepared according to conventional techniques well known in the pharmaceutical industry. Such techniques include the step of bringing into association the active ingredients with the pharmaceutical carrier(s) or excipient(s). In general, the formulations are prepared by uniformly and intimately bringing into association the active ingredients with liquid carriers or finely divided solid carriers or both, and then, if necessary, shaping the product.

[0606] The compositions of the present disclosure can be formulated into any of many possible dosage forms such as, but not limited to, tablets, capsules, gel capsules, liquid syrups, soft gels, suppositories, and enemas. The compositions of the present disclosure can also be formulated as suspensions in aqueous, non-aqueous or mixed media. Aqueous suspensions can further contain substances which increase the viscosity of the suspension including, for example, sodium carboxymethylcellulose, sorbitol or dextran. The suspension can also contain stabilizers.

### C. Additional Formulations

i. Emulsions

[0607] The compositions of the present disclosure can be prepared and formulated as emulsions. Emulsions are typically heterogeneous systems of one liquid dispersed in another in the form of droplets usually exceeding 0.1 μm in diameter (see e.g., Ansel's Pharmaceutical Dosage Forms and Drug Delivery Systems, Allen, L V., Popovich N G., and Ansel H C., 2004, Lippincott Williams & Wilkins (8th ed.), New York, NY; Idson, in Pharmaceutical Dosage Forms, Lieberman. Rieger and Banker (Eds.), 1988, Marcel Dekker, Inc., New York, N.Y., volume 1, p. 199; Rosoff, in Pharmaceutical Dosage Forms, Lieberman, Rieger and Banker (Eds.), 1988, Marcel Dekker, Inc., New York, N.Y., Volume 1, p. 245; Block in Pharmaceutical Dosage Forms, Lieberman, Rieger and Banker (Eds.), 1988, Marcel Dekker, Inc., New York, N.Y., volume 2, p. 335; Higuchi et al., in Remington's Pharmaceutical Sciences, Mack Publishing Co., Easton, Pa., 1985, p. 301). Emulsions are often biphasic systems comprising two immiscible liquid phases intimately mixed and dispersed with each other. In general, emulsions can be of either the water-in-oil (w/o) or the oil-in-water (o/w) variety. When an aqueous phase is finely divided into and dispersed as minute droplets into a bulk oily phase, the resulting composition is called a water-in-oil (w/o) emulsion. Alternatively, when an oily phase is finely divided into and dispersed as minute droplets into a bulk aqueous phase, the resulting composition is called an oil-in-water (o/w) emulsion. Emulsions can contain additional components in addition to the dispersed phases, and the active drug which can be present as a solution in either aqueous phase, oily phase or itself as a separate phase. Pharmaceutical excipients such as emulsifiers, stabilizers, dyes, and anti-oxidants can also be present in emulsions as needed. Pharmaceutical emulsions can also be multiple emulsions that are comprised of more than two phases such as, for example, in the case of oil-in-water-in-oil (o/w/o) and water-in-oil-in-water (w/o/w) emulsions. Such complex formulations often provide certain advantages that simple binary emulsions do not. Multiple emulsions in which individual oil droplets of an o/w emulsion enclose small water droplets constitute a w/o/w emulsion. Likewise, a system of oil droplets enclosed in globules of water stabilized in an oily continuous phase provides an o/w/o emulsion.

[0608] Emulsions are characterized by little or no thermodynamic stability. Often, the dispersed or discontinuous phase of the emulsion is well dispersed into the external or continuous phase and maintained in this form through the means of emulsifiers or the viscosity of the formulation. Either of the phases of the emulsion can be a semisolid or a solid, as is the case of emulsion-style ointment bases and creams. Other means of stabilizing emulsions entail the use of emulsifiers that can be incorporated into either phase of the emulsion. Emulsifiers can broadly be classified into four categories: synthetic surfactants, naturally occurring emulsifiers, absorption bases, and finely dispersed solids (see e.g., Ansel's Pharmaceutical Dosage Forms and Drug Delivery Systems, Allen, L V., Popovich N G., and Ansel H C., 2004, Lippincott Williams & Wilkins (8th ed.), New York, NY; Idson, in Pharmaceutical Dosage Forms, Lieberman, Rieger and Banker (Eds.), 1988, Marcel Dekker, Inc., New York, N.Y., volume 1, p. 199).

[0609] Synthetic surfactants, also known as surface active agents, have found wide applicability in the formulation of emulsions and have been reviewed in the literature (see e.g., Ansel's Pharmaceutical Dosage Forms and Drug Delivery Systems, Allen, L V., Popovich N G., and Ansel H C., 2004, Lippincott Williams & Wilkins (8th ed.), New York, NY; Rieger, in Pharmaceutical Dosage Forms, Lieberman, Rieger and Banker (Eds.), 1988, Marcel Dekker, Inc., New York, N.Y., volume 1, p. 285; Idson, in Pharmaceutical Dosage Forms, Lieberman, Rieger and Banker (Eds.), Marcel Dekker, Inc., New York, N.Y., 1988, volume 1, p. 199). Surfactants are typically amphiphilic and comprise a hydrophilic and a hydrophobic portion. The ratio of the hydrophilic to the hydrophobic nature of the surfactant has been termed the hydrophile/lipophile balance (HLB) and is a valuable tool in categorizing and selecting surfactants in the preparation of formulations. Surfactants can be classified into different classes based on the nature of the hydrophilic group: nonionic, anionic, cationic and amphoteric (see e.g., Ansel's Pharmaceutical Dosage Forms and Drug Delivery Systems, Allen, LV., Popovich N G., and Ansel H C., 2004, Lippincott Williams & Wilkins (8th ed.), New York, NY Rieger, in Pharmaceutical Dosage Forms, Lieberman, Rieger and Banker (Eds.), 1988, Marcel Dekker, Inc., New York, N.Y., volume 1, p. 285).

[0610] Naturally occurring emulsifiers used in emulsion formulations include lanolin, beeswax, phosphatides, lecithin and acacia. Absorption bases possess hydrophilic properties such that they can soak up water to form w/o emulsions yet retain their semisolid consistencies, such as anhydrous lanolin and hydrophilic petrolatum. Finely divided solids have also been used as good emulsifiers especially in combination with surfactants and in viscous preparations. These include polar inorganic solids, such as heavy metal hydroxides, nonswelling clays such as bentonite, attapulgite, hectorite, kaolin, montmorillonite, colloidal aluminum silicate and colloidal magnesium aluminum silicate, pigments and nonpolar solids such as carbon or glyceryl tristearate.

[0611] A large variety of non-emulsifying materials are also included in emulsion formulations and contribute to the properties of emulsions. These include fats, oils, waxes, fatty acids, fatty alcohols, fatty esters, humectants, hydrophilic colloids, preservatives and antioxidants (Block, in Pharmaceutical Dosage Forms, Lieberman, Rieger and Banker (Eds.), 1988, Marcel Dekker, Inc., New York, N.Y., volume 1, p. 335; Idson, in Pharmaceutical Dosage Forms, Lieberman, Rieger and Banker (Eds.), 1988, Marcel Dekker, Inc., New York, N.Y., volume 1, p. 199).

[0612] Hydrophilic colloids or hydrocolloids include naturally occurring gums and synthetic polymers such as polysaccharides (for example, acacia, agar, alginic acid, carrageenan, guar gum, karaya gum, and tragacanth), cellulose derivatives (for example, carboxymethylcellulose and carboxypropylcellulose), and synthetic polymers (for example, carbomers, cellulose ethers, and carboxyvinyl polymers). These disperse or swell in water to form colloidal solutions that stabilize emulsions by forming strong interfacial films around the dispersed-phase droplets and by increasing the viscosity of the external phase.

[0613] Since emulsions often contain a number of ingredients such as carbohydrates, proteins, sterols and phosphatides that can readily support the growth of microbes, these formulations often incorporate preservatives. Commonly used preservatives included in emulsion formulations include methyl paraben, propyl paraben, quaternary ammonium salts, benzalkonium chloride, esters of p-hydroxybenzoic acid, and boric acid. Antioxidants are also commonly added to emulsion formulations to prevent deterioration of the formulation. Antioxidants used can be free radical scavengers such as tocopherols, alkyl gallates, butylated hydroxyanisole, butylated hydroxytoluene, or reducing agents such as ascorbic acid and sodium metabisulfite, and antioxidant synergists such as citric acid, tartaric acid, and lecithin.

[0614] The application of emulsion formulations via dermatological, oral and parenteral routes and methods for their manufacture have been reviewed in the literature (see e.g., Ansel's Pharmaceutical Dosage Forms and Drug Delivery Systems, Allen, LV., Popovich N G., and Ansel H C., 2004, Lippincott Williams & Wilkins (8th ed.), New York, NY; Idson, in Pharmaceutical Dosage Forms, Lieberman, Rieger and Banker (Eds.), 1988, Marcel Dekker, Inc., New York, N.Y., volume 1, p. 199). Emulsion formulations for oral delivery have been very widely used because of ease of formulation, as well as efficacy from an absorption and bioavailability standpoint (see e.g., Ansel's Pharmaceutical Dosage Forms and Drug Delivery Systems, Allen, LV., Popovich N G., and Ansel H C., 2004, Lippincott Williams & Wilkins (8th ed.), New York, NY; Rosoff, in Pharmaceutical Dosage Forms, Lieberman, Rieger and Banker (Eds.), 1988, Marcel Dekker, Inc., New York, N.Y., volume 1, p. 245; Idson, in Pharmaceutical Dosage Forms, Lieberman, Rieger and Banker (Eds.), 1988, Marcel Dekker, Inc., New York, N.Y., volume 1, p. 199). Mineral-oil base laxatives, oil-soluble vitamins and high fat nutritive preparations are among the materials that have commonly been administered orally as o/w emulsions.

ii. Microemulsions

[0615] In one embodiment of the present disclosure, the compositions of RNAi agents and nucleic acids are formulated as microemulsions. A microemulsion can be defined as a system of water, oil and amphiphile which is a single optically isotropic and thermodynamically stable liquid solution (see e.g., Ansel's Pharmaceutical Dosage Forms and Drug Delivery Systems, Allen, LV., Popovich N G., and Ansel H C., 2004, Lippincott Williams & Wilkins (8th ed.), New York, NY; Rosoff, in Pharmaceutical Dosage Forms, Lieberman, Rieger and Banker (Eds.), 1988, Marcel Dekker, Inc., New York, N.Y., volume 1, p. 245). Typically, microemulsions are systems that are prepared by first dispersing an oil in an aqueous surfactant solution and then adding a sufficient amount of a fourth component, generally an intermediate chain-length alcohol to form a transparent system. Therefore, microemulsions have also been described as thermodynamically stable, isotropically clear dispersions of two immiscible liquids that are stabilized by interfacial films of surface-active molecules (Leung and Shah, in: Controlled Release of Drugs: Polymers and Aggregate Systems, Rosoff, M., Ed., 1989, VCH Publishers, New York, pages 185-215). Microemulsions commonly are prepared via a combination of three to five components that include oil, water, surfactant, cosurfactant and electrolyte. Whether the microemulsion is of the water-in-oil (w/o) or an oil-in-water (o/w) type is dependent on the properties of the oil and surfactant used, and on the structure and geometric packing of the polar heads and hydrocarbon tails of the surfactant molecules (Schott, in Remington's Pharmaceutical Sciences, Mack Publishing Co., Easton, Pa., 1985, p. 271).

[0616] The phenomenological approach utilizing phase diagrams has been extensively studied and has yielded a comprehensive knowledge, to one skilled in the art, of how to formulate microemulsions (see e.g., Ansel's Pharmaceutical Dosage Forms and Drug Delivery Systems, Allen. LV., Popovich N G., and Ansel H C., 2004, Lippincott Williams & Wilkins (8th ed.), New York, NY; Rosoff, in Pharmaceutical Dosage Forms, Lieberman, Rieger and Banker (Eds.), 1988, Marcel Dekker, Inc., New York, N.Y., volume 1, p. 245; Block, in Pharmaceutical Dosage Forms, Lieberman, Rieger and Banker (Eds.), 1988, Marcel Dekker, Inc., New York, N.Y., volume 1, p. 335). Compared to conventional emulsions, microemulsions offer the advantage of solubilizing water-insoluble drugs in a formulation of thermodynamically stable droplets that are fonned spontaneously.

[0617] Surfactants used in the preparation of microemulsions include, but are not limited to, ionic surfactants, non-ionic surfactants, Brij 96, polyoxyethylene oleyl ethers, polyglycerol fatty acid esters, tetraglycerol monolaurate (ML310), tetraglycerol monooleate (MO310), hexaglycerol monooleate (PO310), hexaglycerol pentaoleate (P0500), decaglycerol monocaprate (MCA750), decaglycerol monooleate (M0750), decaglycerol sequioleate (S0750), decaglycerol decaoleate (DA0750), alone or in combination with cosurfactants. The cosurfactant, usually a short-chain alcohol such as ethanol, 1-propanol, and 1-butanol, serves to increase the interfacial fluidity by penetrating into the surfactant film and consequently creating a disordered film because of the void space generated among surfactant molecules. Microemulsions can, however, be prepared without the use of cosurfactants and alcohol-free self-emulsifying microemulsion systems are known in the art. The aqueous phase can typically be, but is not limited to, water, an aqueous solution of the drug, glycerol, PEG300, PEG400, polyglycerols, propylene glycols, and derivatives of ethylene glycol. The oil phase can include, but is not limited to, materials such as Captex 300, Captex 355, Capmul MCM, fatty acid esters, medium chain (C8-C12) mono, di, and tri-glycerides, polyoxyethylated glyceryl fatty acid esters, fatty alcohols, polyglycolized glycerides, saturated polyglycolized C8-C10 glycerides, vegetable oils and silicone oil.

[0618] Microemulsions are particularly of interest from the standpoint of drug solubilization and the enhanced absorption of drugs. Lipid based microemulsions (both o/w and w/o) have been proposed to enhance the oral bioavailability of drugs, including peptides (see e.g., U.S. Pat. Nos. 6,191,105; 7,063,860; 7,070,802; 7,157,099; Constantinides et al., Pharmaceutical Research, 1994, 11, 1385-1390; Ritschel, Meth. Find. Exp. Clin. Pharmacol., 1993, 13, 205). Microemulsions afford advantages of improved drug solubilization, protection of drug from enzymatic hydrolysis, possible enhancement of drug absorption due to surfactant-induced alterations in membrane fluidity and permeability, ease of preparation, ease of oral administration over solid dosage forms, improved clinical potency, and decreased toxicity (see e.g., U.S. Pat. Nos. 6,191,105; 7,063,860; 7,070,802; 7,157,099; Constantinides et al., Pharmaceutical Research, 1994, 11, 1385; Ho et al., J. Pharm. Sci., 1996, 85, 138-143). Often microemulsions can form spontaneously when their components are brought together at ambient temperature. This can be particularly advantageous when formulating thermolabile drugs, peptides or RNAi agents. Microemulsions have also been effective in the transdermal delivery of active components in both cosmetic and pharmaceutical applications. It is expected that the microemulsion compositions and formulations of the present disclosure will facilitate the increased systemic absorption of RNAi agents and nucleic acids from the gastrointestinal tract, as well as improve the local cellular uptake of RNAi agents and nucleic acids.

[0619] Microemulsions of the present disclosure can also contain additional components and additives such as sorbitan monostearate (Grill 3), Labrasol, and penetration enhancers to improve the properties of the formulation and to enhance the absorption of the RNAi agents and nucleic acids of the present disclosure. Penetration enhancers used in the microemulsions of the present disclosure can be classified as belonging to one of five broad categories—surfactants, fatty acids, bile salts, chelating agents, and non-chelating non-surfactants (Lee et al., Critical Reviews in Therapeutic Drug Carrier Systems, 1991, p. 92). Each of these classes has been discussed above.

iii. Microparticles

[0620] An RNAi agent of the disclosure may be incorporated into a particle, e.g., a microparticle. Microparticles can be produced by spray-drying, but may also be produced by other methods including lyophilization, evaporation, fluid bed drying, vacuum drying, or a combination of these techniques.

iv. Penetration Enhancers

[0621] In one embodiment, the present disclosure employs various penetration enhancers to effect the efficient delivery of nucleic acids, particularly RNAi agents, to the skin of animals. Most drugs are present in solution in both ionized and nonionized forms. However, usually only lipid soluble or lipophilic drugs readily cross cell membranes. It has been discovered that even non-lipophilic drugs can cross cell membranes if the membrane to be crossed is treated with a penetration enhancer. In addition to aiding the diffusion of non-lipophilic drugs across cell membranes, penetration enhancers also enhance the permeability of lipophilic drugs.

[0622] Penetration enhancers can be classified as belonging to one of five broad categories, i.e., surfactants, fatty acids, bile salts, chelating agents, and non-chelating non-surfactants (see e.g., Malmsten, M. Surfactants and polymers in drug delivery, Informa Health Care, New York, NY, 2002; Lee et al., Critical Reviews in Therapeutic Drug Carrier Systems, 1991, p. 92). Each of the above mentioned classes of penetration enhancers are described below in greater detail.

[0623] Surfactants (or “surface-active agents”) are chemical entities which, when dissolved in an aqueous solution, reduce the surface tension of the solution or the interfacial tension between the aqueous solution and another liquid, with the result that absorption of RNAi agents through the mucosa is enhanced. In addition to bile salts and fatty acids, these penetration enhancers include, for example, sodium lauryl sulfate, polvoxyethylene-9-lauryl ether and polvoxyethylene-20-cetyl ether) (see e.g., Malmsten, M. Surfactants and polymers in drug delivery, Informa Health Care, New York, NY, 2002; Lee et al., Critical Reviews in Therapeutic Drug Carrier Systems, 1991, p. 92); and perfluorochemical emulsions, such as FC-43. Takahashi et al., J. Phann. Pharmacol., 1988, 40, 252).

[0624] Various fatty acids and their derivatives which act as penetration enhancers include, for example, oleic acid, lauric acid, capric acid (n-decanoic acid), myristic acid, palmitic acid, stearic acid, linoleic acid, linolenic acid, dicaprate, tricaprate, monoolein (1-monooleoyl-rac-glycerol), dilaurin, caprylic acid, arachidonic acid, glycerol 1-monocaprate, 1-dodecylazacycloheptan-2-one, acylcarnitines, acylcholines, C₁₋₂₀ alkyl esters thereof (e.g., methyl, isopropyl and t-butyl), and mono- and di-glycerides thereof (i.e., oleate, laurate, caprate, myristate, palmitate, stearate, linoleate, etc.) (see e.g., Touitou, E., et al. Enhancement in Drug Delivery, CRC Press, Danvers, MA, 2006; Lee et al., Critical Reviews in Therapeutic Drug Carrier Systems, 1991, p. 92; Muranishi, Critical Reviews in Therapeutic Drug Carrier Systems, 1990, 7, 1-33; El Hariri et al., J. Pharm. Pharmacol., 1992, 44, 651-654).

[0625] The physiological role of bile includes the facilitation of dispersion and absorption of lipids and fat-soluble vitamins (see e.g., Malmsten, M. Surfactants and polymers in drug delivery, Informa Health Care, New York, NY, 2002; Brunton, Chapter 38 in: Goodman & Gilman's The Pharmacological Basis of Therapeutics, 9th Ed., Hardman et al. Eds., McGraw-Hill, New York, 1996, pp. 934-935). Various natural bile salts, and their synthetic derivatives, act as penetration enhancers. Thus the term “bile salts” includes any of the naturally occurring components of bile as well as any of their synthetic derivatives. Suitable bile salts include, for example, cholic acid (or its pharmaceutically acceptable sodium salt, sodium cholate), dehydrocholic acid (sodium dehydrocholate), deoxycholic acid (sodium deoxycholate), glucholic acid (sodium glucholate), glycholic acid (sodium glycocholate), glycodeoxycholic acid (sodium glycodeoxycholate), taurocholic acid (sodium taurocholate), taurodeoxycholic acid (sodium taurodeoxycholate), chenodeoxycholic acid (sodium chenodeoxycholate), ursodeoxycholic acid (UDCA), sodium tauro-24,25-dihydro-fusidate (STDHF), sodium glycodihydrofusidate and polyoxyethylene-9-lauryl ether (POE) (see e.g., Malmsten, M. Surfactants and polymers in drug delivery, Informa Health Care, New York, NY, 2002; Lee et al., Critical Reviews in Therapeutic Drug Carrier Systems, 1991, page 92; Swinyard. Chapter 39 In: Remington's Pharmaceutical Sciences, 18th Ed., Gennaro, ed., Mack Publishing Co., Easton, Pa., 1990, pages 782-783; Muranishi, Critical Reviews in Therapeutic Drug Carrier Systems, 1990, 7, 1-33; Yamamoto et al., J. Pharm. Exp. Ther., 1992, 263, 25; Yamashita et al., J. Pharm. Sci., 1990, 79, 579-583).

[0626] Chelating agents, as used in connection with the present disclosure, can be defined as compounds that remove metallic ions from solution by forming complexes therewith, with the result that absorption of RNAi agents through the mucosa is enhanced. With regards to their use as penetration enhancers in the present disclosure, chelating agents have the added advantage of also serving as DNase inhibitors, as most characterized DNA nucleases require a divalent metal ion for catalysis and are thus inhibited by chelating agents (Jarrett, J. Chromatogr., 1993, 618, 315-339). Suitable chelating agents include but are not limited to disodium ethylenediaminetetraacetate (EDTA), citric acid, salicylates (e.g., sodium salicylate, 5-methoxysalicylate and homovanilate), N-acyl derivatives of collagen, laureth-9 and N-amino acyl derivatives of beta-diketones (enamines)(see e.g., Katdare, A. et al., Excipient development for pharmaceutical, biotechnology, and drug delivery, CRC Press, Danvers, MA, 2006; Lee et al., Critical Reviews in Therapeutic Drug Carrier Systems, 1991, page 92; Muranishi, Critical Reviews in Therapeutic Drug Carrier Systems, 1990, 7, 1-33; Buur et al., J. Control Rel., 1990, 14, 43-51).

[0627] As used herein, non-chelating non-surfactant penetration enhancing compounds can be defined as compounds that demonstrate insignificant activity as chelating agents or as surfactants but that nonetheless enhance absorption of RNAi agents through the alimentary mucosa (see e.g., Muranishi, Critical Reviews in Therapeutic Drug Carrier Systems, 1990, 7, 1-33). This class of penetration enhancers includes, for example, unsaturated cyclic ureas, 1-alkyl- and 1-alkenylazacyclo-alkanone derivatives (Lee et al., Critical Reviews in Therapeutic Drug Carrier Systems, 1991, page 92); and non-steroidal anti-inflammatory agents such as diclofenac sodium, indomethacin and phenylbutazone (Yamashita et al., J. Pharm. Pharmacol., 1987, 39, 621-626).

[0628] Agents that enhance uptake of RNAi agents at the cellular level can also be added to the pharmaceutical and other compositions of the present disclosure. For example, cationic lipids, such as lipofectin (Junichi et al, U.S. Pat. No. 5,705,188), cationic glycerol derivatives, and polycationic molecules, such as polylysine (WO 97/30731), are also known to enhance the cellular uptake of dsRNAs.

[0629] Other agents can be utilized to enhance the penetration of the administered nucleic acids, including glycols such as ethylene glycol and propylene glycol, pyrrols such as 2-pyrrol, azones, and terpenes such as limonene and menthone.

vi. Excipients

[0630] In contrast to a carrier compound, a “pharmaceutical carrier” or “excipient” is a pharmaceutically acceptable solvent, suspending agent or any other pharmacologically inert vehicle for delivering one or more nucleic acids to an animal. The excipient can be liquid or solid and is selected, with the planned manner of administration in mind, so as to provide for the desired bulk, consistency, etc., when combined with a nucleic acid and the other components of a given pharmaceutical composition. Typical pharmaceutical carriers include, but are not limited to, binding agents (e.g., pregelatinized maize starch, polyvinylpyrrolidone or hydroxypropyl methylcellulose, etc.); fillers (e.g., lactose and other sugars, microcrystalline cellulose, pectin, gelatin, calcium sulfate, ethyl cellulose, polyacrylates or calcium hydrogen phosphate, etc.); lubricants (e.g., magnesium stearate, talc, silica, colloidal silicon dioxide, stearic acid, metallic stearates, hydrogenated vegetable oils, corn starch, polyethylene glycols, sodium benzoate, sodium acetate, etc.); disintegrants (e.g., starch, sodium starch glycolate, etc.); and wetting agents (e.g., sodium lauryl sulphate, etc.).

[0631] Pharmaceutically acceptable organic or inorganic excipients suitable for non-parenteral administration which do not deleteriously react with nucleic acids can also be used to formulate the compositions of the present disclosure. Suitable pharmaceutically acceptable carriers include, but are not limited to, water, salt solutions, alcohols, polyethylene glycols, gelatin, lactose, amylose, magnesium stearate, talc, silicic acid, viscous paraffin, hydroxymethylcellulose, polyvinylpyrrolidone and the like.

[0632] Formulations for topical administration of nucleic acids can include sterile and non-sterile aqueous solutions, non-aqueous solutions in common solvents such as alcohols, or solutions of the nucleic acids in liquid or solid oil bases. The solutions can also contain buffers, diluents and other suitable additives. Pharmaceutically acceptable organic or inorganic excipients suitable for non-parenteral administration which do not deleteriously react with nucleic acids can be used.

[0633] Suitable pharmaceutically acceptable excipients include, but are not limited to, water, salt solutions, alcohol, polyethylene glycols, gelatin, lactose, amylose, magnesium stearate, talc, silicic acid, viscous paraffin, hydroxymethylcellulose, polyvinylpyrrolidone and the like.

vii. Other Components

[0634] The compositions of the present disclosure can additionally contain other adjunct components conventionally found in pharmaceutical compositions, at their art-established usage levels. Thus, for example, the compositions can contain additional, compatible, pharmaceutically-active materials such as, for example, antipruritics, astringents, local anesthetics or anti-inflammatory agents, or can contain additional materials useful in physically formulating various dosage forms of the compositions of the present disclosure, such as dyes, flavoring agents, preservatives, antioxidants, opacifiers, thickening agents and stabilizers. However, such materials, when added, should not unduly interfere with the biological activities of the components of the compositions of the present disclosure. The formulations can be sterilized and, if desired, mixed with auxiliary agents, e.g., lubricants, preservatives, stabilizers, wetting agents, emulsifiers, salts for influencing osmotic pressure, buffers, colorings, flavorings or aromatic substances and the like which do not deleteriously interact with the nucleic acid(s) of the formulation.

[0635] Aqueous suspensions can contain substances which increase the viscosity of the suspension including, for example, sodium carboxymethylcellulose, sorbitol or dextran. The suspension can also contain stabilizers.

[0636] In some embodiments, pharmaceutical compositions featured in the disclosure include (a) one or more RNAi agents and (b) one or more agents which function by a non-RNAi mechanism and which are useful in treating an ABLIM3-associated disorder, e.g., PTSD or age-related memory loss. Examples of such agents include, are provided elsewhere herein.

[0637] Toxicity and therapeutic efficacy of such compounds can be determined by standard pharmaceutical procedures in cell cultures or experimental animals, e.g., for determining the LD₅₀ (the dose lethal to 50% of the population) and the ED₅₀ (the dose therapeutically effective in 50% of the population). The dose ratio between toxic and therapeutic effects is the therapeutic index and it can be expressed as the ratio LD₅₀/ED₅₀. Compounds that exhibit high therapeutic indices are preferred.

[0638] The data obtained from cell culture assays and animal studies can be used in formulating a range of dosage for use in humans. The dosage of compositions featured herein in the disclosure lies generally within a range of circulating concentrations that include the ED₅₀ with little or no toxicity. The dosage can vary within this range depending upon the dosage form employed and the route of administration utilized. For any compound used in the methods featured in the disclosure, the therapeutically effective dose can be estimated initially from cell culture assays. A dose can be formulated in animal models to achieve a circulating plasma concentration range of the compound or, when appropriate, of the polypeptide product of a target sequence (e.g., achieving a decreased concentration of the polypeptide) that includes the IC₅₀ (i.e., the concentration of the test compound which achieves a half-maximal inhibition of symptoms) as determined in cell culture. Such information can be used to more accurately determine useful doses in humans. Levels in plasma can be measured, for example, by high performance liquid chromatography.

[0639] In addition to their administration, as discussed above, the RNAi agents featured in the disclosure can be administered in combination with other known agents effective in treatment of pathological processes mediated by nucleotide repeat expression. In any event, the administering physician can adjust the amount and timing of RNAi agent administration on the basis of results observed using standard measures of efficacy known in the art or described herein.

### VII. Kits

[0640] In certain aspects, the instant disclosure provides kits that include a suitable container containing a pharmaceutical formulation of a siRNA compound, e.g., a double-stranded siRNA compound, or ssiRNA compound, (e.g., a precursor, e.g., a larger siRNA compound which can be processed into a ssiRNA compound, or a DNA which encodes an siRNA compound, e.g., a double-stranded siRNA compound, or ssiRNA compound, or precursor thereof).

[0641] Such kits include one or more dsRNA agent(s) and instructions for use, e.g., instructions for administering a prophylactically or therapeutically effective amount of a dsRNA agent(s). The dsRNA agent may be in a vial or a pre-filled syringe. The kits may optionally further comprise means for administering the dsRNA agent (e.g., an injection device, such as a pre-filled syringe or an intrathecal pump), or means for measuring the inhibition of C3 (e.g., means for measuring the inhibition of ABLIM3 mRNA. ABLIM3 protein, and/or ABLIM3 activity). Such means for measuring the inhibition of ABLIM3 may comprise a means for obtaining a sample from a subject, such as, e.g., a CSF and/or plasma sample. The kits of the invention may optionally further comprise means for determining the therapeutically effective or prophylactically effective amount.

[0642] In certain embodiments the individual components of the pharmaceutical formulation may be provided in one container. Alternatively, it may be desirable to provide the components of the pharmaceutical formulation separately in two or more containers, e.g., one container for a siRNA compound preparation, and at least another for a carrier compound. The kit may be packaged in a number of different configurations such as one or more containers in a single box. The different components can be combined, e.g., according to instructions provided with the kit. The components can be combined according to a method described herein, e.g., to prepare and administer a pharmaceutical composition. The kit can also include a delivery device.

### VIII. Methods for Inhibiting ABLIM3 Expression

[0643] The present disclosure also provides methods of inhibiting expression of an ABLIM3 gene in a cell. The methods include contacting a cell with an RNAi agent, e.g., double stranded RNAi agent, in an amount effective to inhibit expression and/or activity of ABLIM3 in the cell, thereby inhibiting expression and/or activity of ABLIM3 in the cell. In certain embodiments of the disclosure, ABLIM3 expression and/or activity is inhibited by at least 30% preferentially in CNS (e.g., brain) cells. In specific embodiments, ABLIM3 expression and/or activity is inhibited by at least 30%.

[0644] Contacting of a cell with an RNAi agent, e.g., a double stranded RNAi agent, may be done in vitro or in vivo. Contacting a cell in vivo with the RNAi agent includes contacting a cell or group of cells within a subject, e.g., a human subject, with the RNAi agent. Combinations of in vitro and in vivo methods of contacting a cell are also possible.

[0645] Contacting a cell may be direct or indirect, as discussed above. Furthermore, contacting a cell may be accomplished via a targeting ligand, including any ligand described herein or known in the art. In some embodiments, the targeting ligand is a carbohydrate moiety, e.g., a GalNAc ligand, or any other ligand that directs the RNAi agent to a site of interest.

[0646] The term “inhibiting,” as used herein, is used interchangeably with “reducing,” “silencing,” “downregulating,” “suppressing” and other similar terms, and includes any level of inhibition. In certain embodiments, a level of inhibition, e.g., for an RNAi agent of the instant disclosure, can be assessed in cell culture conditions, e.g., wherein cells in cell culture are transfected via Lipofectamine™-mediated transfection at a concentration in the vicinity of a cell of 10 nM or less, 1 nM or less, etc. Knockdown of a given RNAi agent can be determined via comparison of pre-treated levels in cell culture versus post-treated levels in cell culture, optionally also comparing against cells treated in parallel with a scrambled or other form of control RNAi agent. Knockdown in cell culture of, e.g., at least about 30%, can thereby be identified as indicative of “inhibiting” or “reducing”, “downregulating” or “suppressing”, etc. having occurred. It is expressly contemplated that assessment of targeted mRNA or encoded protein levels (and therefore an extent of “inhibiting”, etc. caused by an RNAi agent of the disclosure) can also be assessed in in vivo systems for the RNAi agents of the instant disclosure, under properly controlled conditions as described in the art.

[0647] The phrase “inhibiting ABLIM3,” “inhibiting expression of an ABLIM3 gene” or “inhibiting expression of ABLIM3,” as used herein, includes inhibition of expression of any ABLIM3 gene (such as, e.g., a mouse ABLIM3 gene, a rat ABLIM3 gene, a monkey ABLIM3 gene, or a human ABLIM3 gene) as well as variants or mutants of an ABLIM3 gene that encode an ABLIM3 protein. Thus, the ABLIM3 gene may be a wild-type ABLIM3 gene, a mutant ABLIM3 gene, or a transgenic ABLIM3 gene in the context of a genetically manipulated cell, group of cells, or organism.

[0648] “Inhibiting expression of an ABLIM3 gene” includes any level of inhibition of an ABLIM3 gene, e.g., at least partial suppression of the expression of an ABLIM3 gene, such as an inhibition by at least 30%. In certain embodiments, inhibition is by at least 35%, at least 40%, at least 45%, by at least 50%, at least 55%, by at least 60%, by at least 65%, by at least 70%, by at least 75%, by at least 80%, by at least 85%, by at least 90%, by at least 95%, or by at least 99%. ABLIM3 inhibition can be measured using the in vitro assay with, e.g., BE(2)-C cells and a 10 nM concentration of the RNA agent and the PCR assay as provided in the examples herein, are contemplated to be within the scope of the present disclosure. In some embodiments, ABLIM3 inhibition can be measured using the in vitro assay with primary mouse hepatocytes. In another embodiment, ABLIM3 inhibition can be measured using the in vitro assay with Cos-7 (Dual-Luciferase psiCHECK2 vector). In yet another embodiment, ABLIM3 inhibition can be measured using the in vitro assay with BE(2)-C cells. In some embodiments, ABLIM3 inhibition can be measured using the in vitro assay with Neuro-2a cells.

[0649] The expression of an ABLIM3 gene may be assessed based on the level of any variable associated with ABLIM3 gene expression, e.g., ABLIM3 mRNA level (e.g., sense mRNA, antisense mRNA, and/or total ABLIM3 mRNA) or ABLIM3 protein level (e.g., total ABLIM3 protein and/or wild-type ABLIM3 protein).

[0650] Inhibition may be assessed by a decrease in an absolute or relative level of one or more of these variables compared with a control level. The control level may be any type of control level that is utilized in the art, e.g., a pre-dose baseline level, or a level determined from a similar subject, cell, or sample that is untreated or treated with a control (such as, e.g., buffer only control or inactive agent control).

[0651] For example, in some embodiments of the methods of the disclosure, expression of an ABLIM3 gene is inhibited by at least 30%, 40%, 50%, 60%, 70%, 80%, 85%, 90%, or 95%, or to below the level of detection of the assay. In certain embodiments, the methods include a clinically relevant inhibition of expression of ABLIM3, e.g. as demonstrated by a clinically relevant outcome after treatment of a subject with an agent to reduce the expression of ABLIM3.

[0652] Inhibition of the expression of an ABLIM3 gene may be manifested by a reduction of the amount of mRNA expressed by a first cell or group of cells (such cells may be present, for example, in a sample derived from a subject) in which an ABLIM3 gene is transcribed and which has or have been treated (e.g., by contacting the cell or cells with an RNAi agent of the disclosure, or by administering an RNAi agent of the disclosure to a subject in which the cells are or were present) such that the expression of an ABLIM3 gene is inhibited, as compared to a second cell or group of cells substantially identical to the first cell or group of cells but which has not or have not been so treated (control cell(s) not treated with an RNAi agent or not treated with an RNAi agent targeted to the gene of interest). The degree of inhibition may be expressed in terms of:

$$\frac{( mRNA in control cells ) - ( mRNA in treated cells )}{( mRNA in control cells )} \cdot 100 \%$$

[0653] In other embodiments, inhibition of the expression of an ABLIM3 gene may be assessed in terms of a reduction of a parameter that is functionally linked to an ABLIM3 gene expression, e.g., ABLIM3 protein expression. ABLIM3 gene silencing may be determined in any cell expressing ABLIM3, either endogenous or heterologous from an expression construct, and by any assay known in the art.

[0654] Inhibition of the expression of an ABLIM3 protein may be manifested by a reduction in the level of the ABLIM3 protein (or functional parameter, e.g., activity) that is expressed by a cell or group of cells (e.g., the level of protein expressed in a sample derived from a subject). As explained above, for the assessment of mRNA suppression, the inhibition of protein expression levels in a treated cell or group of cells may similarly be expressed as a percentage of the level of protein in a control cell or group of cells. In some embodiments, the phrase “inhibiting ABLIM3”, can also refer to the inhibition of the activity of ABLIM3, e.g., at least partial suppression of the ABLIM3 activity, such as an inhibition by at least 30%. In certain embodiments, inhibition of the ABLIM3 activity is by at least 35%, at least 40%, at least 45%, by at least 50%, at least 55%, by at least 60%, by at least 65%, by at least 70%, by at least 75%, by at least 80%, by at least 85%, by at least 90%, by at least 95%, or by at least 99%. ABLIM3 activity can be measured using an in vitro assay, such as an actin binding assay, e.g., the assay described in (Srivastava et al., 2008, J Vis Exp, 13:690).

[0655] A control cell or group of cells that may be used to assess the inhibition of the expression of an ABLIM3 gene includes a cell or group of cells that has not yet been contacted with an RNAi agent of the disclosure. For example, the control cell or group of cells may be derived from an individual subject (e.g., a human or animal subject) prior to treatment of the subject with an RNAi agent.

[0656] The level of ABLIM3 mRNA that is expressed by a cell or group of cells may be determined using any method known in the art for assessing mRNA expression. In one embodiment, the level of expression of ABLIM3 in a sample is determined by detecting a transcribed polynucleotide, or portion thereof, e.g., mRNA of the ABLIM3 gene. RNA may be extracted from cells using RNA extraction techniques including, for example, using acid phenol/guanidine isothiocyanate extraction (RNAzol B; Biogenesis), RNeasy™ RNA preparation kits (Qiagen®) or PAXgene (PreAnalytix, Switzerland). Typical assay formats utilizing ribonucleic acid hybridization include nuclear run-on assays, RT-PCR, RNase protection assays, northern blotting, in situ hybridization, and microarray analysis. Strand specific ABLIM3 mRNAs may be detected using the quantitative RT-PCR and or droplet digital PCR methods described in, for example, Jiang, et al. supra, Lagier-Tourenne, et al., supra and Jiang, et al., supra. Circulating ABLIM3 mRNA may be detected using methods the described in WO2012/177906, the entire contents of which are hereby incorporated herein by reference.

[0657] In some embodiments, the level of expression of ABLIM3 is determined using a nucleic acid probe. The term “probe”, as used herein, refers to any molecule that is capable of selectively binding to a specific ABLIM3 nucleic acid or protein, or fragment thereof. Probes can be synthesized by one of skill in the art, or derived from appropriate biological preparations. Probes may be specifically designed to be labeled. Examples of molecules that can be utilized as probes include, but are not limited to, RNA, DNA, proteins, antibodies, and organic molecules.

[0658] Isolated mRNA can be used in hybridization or amplification assays that include, but are not limited to, Southern or northern analyses, polymerase chain reaction (PCR) analyses and probe arrays. One method for the determination of mRNA levels involves contacting the isolated mRNA with a nucleic acid molecule (probe) that can hybridize to ABLIM3 mRNA. In one embodiment, the mRNA is immobilized on a solid surface and contacted with a probe, for example by running the isolated mRNA on an agarose gel and transferring the mRNA from the gel to a membrane, such as nitrocellulose. In an alternative embodiment, the probe(s) are immobilized on a solid surface and the mRNA is contacted with the probe(s), for example, in an Affymetrix® gene chip array. A skilled artisan can readily adapt known mRNA detection methods for use in determining the level of ABLIM3 mRNA.

[0659] An alternative method for determining the level of expression of ABLIM3 in a sample involves the process of nucleic acid amplification or reverse transcriptase (to prepare cDNA) of for example mRNA in the sample, e.g., by RT-PCR (the experimental embodiment set forth in Mullis, 1987, U.S. Pat. No. 4,683,202), ligase chain reaction (Barany (1991) Proc. Natl. Acad. Sci. USA 88:189-193), self-sustained sequence replication (Guatelli et al. (1990) Proc. Natl. Acad. Sci. USA 87:1874-1878), transcriptional amplification system (Kwoh et al. (1989) Proc. Natl. Acad. Sci. USA 86:1173-1177), Q-Beta Replicase (Lizardi et al. (1988) Bio/Technology 6:1197), rolling circle replication (Lizardi et al., U.S. Pat. No. 5,854,033) or any other nucleic acid amplification method, followed by the detection of the amplified molecules using techniques well known to those of skill in the art. These detection schemes are especially useful for the detection of nucleic acid molecules if such molecules are present in very low numbers. In particular aspects of the disclosure, the level of expression of ABLIM3 is determined by quantitative fluorogenic RT-PCR (i.e., the TaqMan™ System), by a Dual-Glo® Luciferase assay, or by other art-recognized method for measurement of ABLIM3 expression or mRNA level.

[0660] The expression level of ABLIM3 mRNA may be monitored using a membrane blot (such as used in hybridization analysis such as northern, Southern, dot, and the like), or microwells, sample tubes, gels, beads or fibers (or any solid support comprising bound nucleic acids). See U.S. Pat. Nos. 5,770,722, 5,874,219, 5,744,305, 5,677,195 and 5,445,934, which are incorporated herein by reference. The determination of ABLIM3 expression level may also comprise using nucleic acid probes in solution.

[0661] In some embodiments, the level of mRNA expression is assessed using branched DNA (bDNA) assays or real time PCR (qPCR). The use of this PCR method is described and exemplified in the Examples presented herein. Such methods can also be used for the detection of ABLIM3 nucleic acids.

[0662] The level of ABLIM3 protein expression may be determined using any method known in the art for the measurement of protein levels. Such methods include, for example, electrophoresis, capillary electrophoresis, high performance liquid chromatography (HPLC), thin layer chromatography (TLC), hyperdiffusion chromatography, fluid or gel precipitin reactions, absorption spectroscopy, a colorimetric assays, spectrophotometric assays, flow cytometry, immunodiffusion (single or double), immunoelectrophoresis, western blotting, radioimmunoassay (RIA), enzyme-linked immunosorbent assays (ELISAs), immunofluorescent assays, electrochemiluminescence assays, and the like. Such assays can also be used for the detection of proteins indicative of the presence or replication of ABLIM3 proteins. In some embodiments, the efficacy of the methods of the disclosure in the treatment of an ABLIM3-associated disease, e.g., PTSD or age-related memory loss, is assessed by a decrease in ABLIM3 mRNA level (e.g., by assessment of a CSF sample and/or plasma sample for ABLIM3 level, by brain biopsy, or otherwise).

[0663] In some embodiments of the methods of the disclosure, the RNAi agent is administered to a subject such that the RNAi agent is delivered to a specific site within the subject. The inhibition of expression of ABLIM3 may be assessed using measurements of the level or change in the level of ABLIM3 mRNA (e.g., sense mRNA, antisense mRNA, total ABLIM3 mRNA) and/or ABLIM3 protein (e.g., total ABLIM3 protein, wild-type ABLIM3 protein) in a sample derived from a specific site within the subject, e.g., CNS cells. In certain embodiments, the methods include a clinically relevant inhibition of expression of ABLIM3, e.g. as demonstrated by a clinically relevant outcome after treatment of a subject with an agent to reduce the expression of ABLIM3, such as, for example, in a subject. In certain embodiments, a clinically relevant inhibition of expression of ABLIM3 is demonstrated by improved memory; a decrease in anxiety, depression, fear, agitation, hostility, and/or distress; fewer nightmares, intrusive thoughts, and/or flashbacks; and/or a reduction in physical symptoms including pain, sweating, nausea, and trembling.

[0664] As used herein, the terms detecting or determining a level of an analyte are understood to mean performing the steps to determine if a material, e.g., protein, RNA, is present. As used herein, methods of detecting or determining include detection or determination of an analyte level that is below the level of detection for the method used.

### IX. Methods of Treating or Preventing ABLIM3-Associated Diseases

[0665] The present disclosure also provides methods of using an RNAi agent of the disclosure or a composition containing an RNAi agent of the disclosure to reduce or inhibit ABLIM3 expression in a cell. The methods include contacting the cell with a dsRNA of the disclosure and maintaining the cell for a time sufficient to obtain degradation of the mRNA transcript of an ABLIM3 gene, thereby inhibiting expression of the ABLIM3 gene in the cell.

[0666] Reduction in gene expression can be assessed by any methods known in the art. For example, a reduction in the expression of ABLIM3 may be determined by determining the mRNA expression level of ABLIM3 using methods routine to one of ordinary skill in the art. e.g., northern blotting, qRT-PCR; by determining the protein level of ABLIM3 using methods routine to one of ordinary skill in the art, such as western blotting, immunological techniques.

[0667] In the methods of the disclosure the cell may be contacted in vitro or in vivo, i.e., the cell may be within a subject.

[0668] A cell suitable for treatment using the methods of the disclosure may be any cell that expresses an ABLIM3 gene. A cell suitable for use in the methods of the disclosure may be a mammalian cell, e.g., a primate cell (such as a human cell or a non-human primate cell, e.g., a monkey cell or a chimpanzee cell), a non-primate cell (such as a rat cell, or a mouse cell). In one embodiment, the cell is a human cell, e.g., a human CNS cell.

[0669] ABLIM3 expression (e.g., as assessed by sense mRNA, antisense mRNA, total ABLIM3 mRNA, total ABLIM3 protein) is inhibited in the cell by at least 30%, 40%, preferably at least 50%, 60%, 70%, 80%, 85%, 90%, or 95%, 99%, or to below the level of detection of the assay.

[0670] The in vivo methods of the disclosure may include administering to a subject a composition containing an RNAi agent, where the RNAi agent includes a nucleotide sequence that is complementary to at least a part of an RNA transcript of the ABLIM3 gene of the mammal to be treated. When the organism to be treated is a mammal such as a human, the composition can be administered by any means known in the art including, but not limited to oral, intraperitoneal, or parenteral routes, including intracranial (e.g., intraventricular, intraparenchymal, and intrathecal), intravenous, intramuscular, intravitreal, subcutaneous, transdermal, airway (aerosol), nasal, rectal, and topical (including buccal and sublingual) administration. In certain embodiments, the compositions are administered by intravenous infusion or injection. In certain embodiments, the compositions are administered by subcutaneous injection. In certain embodiments, the compositions are administered by intrathecal injection.

[0671] In some embodiments, the administration is via a depot injection. A depot injection may release the RNAi agent in a consistent way over a prolonged time period. Thus, a depot injection may reduce the frequency of dosing needed to obtain a desired effect, e.g., a desired inhibition of ABLIM3, or a therapeutic or prophylactic effect. A depot injection may also provide more consistent serum concentrations. Depot injections may include subcutaneous injections or intramuscular injections. For example, the depot injection may be a subcutaneous injection.

[0672] In some embodiments, the administration is via a pump. The pump may be an external pump or a surgically implanted pump. In certain embodiments, the pump is a subcutaneously implanted osmotic pump. In other embodiments, the pump is an infusion pump. An infusion pump may be used for intracranial, intravenous, subcutaneous, arterial, or epidural infusions. In one embodiment, the infusion pump is a subcutaneous infusion pump. In other embodiments, the pump is a surgically implanted pump that delivers the RNAi agent to the CNS.

[0673] The mode of administration may be chosen based upon whether local or systemic treatment is desired and based upon the area to be treated. The route and site of administration may be chosen to enhance targeting.

[0674] In one aspect, the present disclosure also provides methods for inhibiting the expression of an ABLIM3 gene in a mammal. The methods include administering to the mammal a composition comprising a dsRNA that targets an ABLIM3 gene in a cell of the mammal, thereby inhibiting expression of the ABLIM3 gene in the cell. Reduction in gene expression can be assessed by any methods known it the art and by methods, e.g. qRT-PCR, described herein. Reduction in protein production can be assessed by any methods known it the art and by methods, e.g. ELISA, described herein. In one embodiment, a CNS biopsy sample or a cerebrospinal fluid (CSF) sample serves as the tissue material for monitoring the reduction in ABLIM3 gene or protein expression (or of a proxy therefore).

[0675] The present disclosure further provides methods of treatment of a subject in need thereof. The treatment methods of the disclosure include administering an RNAi agent of the disclosure to a subject, e.g., a subject that would benefit from inhibition of ABLIM3 expression, such as a subject having PTSD or age-related memory loss, in a therapeutically effective amount of an RNAi agent targeting an ABLIM3 gene or a pharmaceutical composition comprising an RNAi agent targeting an ABLIM3 gene.

[0676] In addition, the present disclosure provides methods of preventing, treating or inhibiting the progression of an ABLIM3-associated disease or condition in a subject. The methods include administering to the subject a therapeutically effective amount of any of the RNAi agent, e.g., dsRNA agents, or the pharmaceutical composition provided herein, thereby preventing, treating or inhibiting the progression of an ABLIM3-associated disease or condition in the subject.

[0677] An RNAi agent of the disclosure may be administered as a “free RNAi agent.” A free RNAi agent is administered in the absence of a pharmaceutical composition. The naked RNAi agent may be in a suitable buffer solution. The buffer solution may comprise acetate, citrate, prolamine, carbonate, or phosphate, or any combination thereof. In one embodiment, the buffer solution is phosphate buffered saline (PBS). The pH and osmolarity of the buffer solution containing the RNAi agent can be adjusted such that it is suitable for administering to a subject.

[0678] Alternatively, an RNAi agent of the disclosure may be administered as a pharmaceutical composition, such as a dsRNA liposomal formulation.

[0679] In one embodiment, the subject is a human. Subjects that would benefit from a reduction or inhibition of ABLIM3 gene expression include those having an ABLIM3-associated disease, such as PTSD or age-related memory loss.

[0680] In one embodiment, an ABLIM3-associated disease is post-traumatic stress disorder (PTSD). PTSD is a disorder that is triggered by experiencing or witnessing a traumatic, terrifying, or dangerous event. People with PTSD may experience severe anxiety, nightmares, uncontrollable thoughts, and flashbacks and these symptoms can last for months to years and interfere with daily life. Little is known about the molecular mechanisms of PTSD, although studies suggest dysfunction of contextual processing, which is a function of the hippocampal-prefrontal-thalamic circuitry, may contribute to PTSD pathophysiology (Liberzon and Abelson, 2017, Neuron, 92(1): 14-30).

[0681] Treatment for PTSD includes therapies, such as cognitive, behavioral, and exposure therapy, or psychopharmacology treatments, such as Fluoxetine (Prozac), Paroxetine (Paxil), Sertraline (Zoloft), Venlafaxine (Effexor), antidepressants, monoamine oxidase inhibitors (MAOIs), antipsychotics or second generation antipsychotics (SGAs), beta-blockers, and benzodiazepines. However, the nonresponse to psychological thereapies can be as high as 50% and psychopharmacology treatments have a low efficacy for treating PTSD.

[0682] In one embodiment, an ABLIM3-associated disease is age-related memory loss. Changes in memory occur naturally during aging and age-related cognitive changes (e.g., memory loss) can present as frequently losing or misplacing things, frequently forgetting conversations, appointments, and events, difficulty remembering names, difficulty following a conversation, and difficulty coming up with the desired words. Over time, memories are generalized and the details of the memories are lost. Little is known about the mechanism of memory precision and generalization and the loss of details over time. There is evidence that the hippocampus, through hippocampal-cortical interactions, plays an important role in maintenance of memory specificity. Memories are thought to be encoded in the hippocampus in dentate granule cells called engram-bearing dentate granule cells.

[0683] A recent study by Guo et al., found that the levels of ABLIM3 decreased upon learning (Guo, et al., 2018, Nat Med. 24(4):438-449). ABLIM3 was highly expressed in dentate granuale cells and localized to the mossy fiber terminals, at sites of structural stabilization, that form excitatory synapses with stratum lucidum interneurons. The study found that downregulation of ABLIM3 in dentate granule cells decreased remote memory generalization and increased remote memory precision, which could help alleviate memory impairments and PTSD.

[0684] The disclosure further provides methods for the use of an RNAi agent or a pharmaceutical composition thereof, e.g., for treating a subject that would benefit from reduction or inhibition of ABLIM3 expression, e.g., a subject having an ABLIM3-associated disorder, in combination with other pharmaceuticals or other therapeutic methods, e.g., with known pharmaceuticals or known therapeutic methods, such as, for example, those which are currently employed for treating these disorders. For example, in certain embodiments, an RNAi agent targeting ABLIM3 is administered in combination with, e.g., an agent useful in treating an ABLIM3-associated disorder as described elsewhere herein or as otherwise known in the art. For example, additional agents suitable for treating a subject that would benefit from reduction in ABLIM3 expression, e.g., a subject having an ABLIM3-associated disorder, such as PTSD or age-related memory loss, may include agents currently used to treat or prevent these ABLIM3-associated disorders or treat or prevent symptoms of these ABLIM3-associated disorders. The RNAi agent and additional therapeutic agents or methods may be administered at the same time or in the same combination, e.g., intrathecally. Alternatively, the additional therapeutic agent or method can be administered as part of a separate composition or at separate times or by another method known in the art or described herein, in conjunction with or separately from administration of the RNAi agent of the present invention.

[0685] For example, additional therapeutic agents and therapeutic methods suitable for preventing or treating PTSD include Fluoxetine (Prozac), Paroxetine (Paxil), Sertraline (Zoloft), Venlafaxine (Effexor), antidepressants, monoamine oxidase inhibitors (MAOIs), antipsychotics or second generation antipsychotics (SGAs), beta-blockers, benzodiazepines, trauma-focused psychotherapies, prolonged exposure (PE) therapy, cognitive processing therapy (CPT), and eye movement desensitization and reprocessing (EMDR).

[0686] For example, additional therapeutic agents and therapeutic methods suitable for preventing or treating age-related memory loss include cholinesterase inhibitors (Aricept, Exelon, Razadyne), memantine (Namenda), Adderall, and Ritalin.

[0687] In addition, agents that decrease or otherwise affect the ABLIM3 activity may be used in combination with the agent or method of the present invention. Exemplary agents that decrease or otherwise affect the ABLIM3 activity include, but are not limited to, small molecule ABLIM3 inhibitors and anti-ABLIM3 antibodies.

[0688] In one embodiment, the method includes administering a composition featured herein such that expression of the target ABLIM3 gene is decreased, for at least one month. In certain embodiments, expression is decreased for at least 2 months, 3 months, or 6 months.

[0689] In certain embodiments, the RNAi agents useful for the methods and compositions featured herein specifically target RNAs (primary or processed) of the target ABLIM3 gene. Compositions and methods for inhibiting the expression of these genes using RNAi agents can be prepared and performed as described herein.

[0690] Administration of the dsRNA according to the methods of the disclosure may result in a reduction of the severity, signs, symptoms, or markers of such diseases or disorders in a patient with an ABLIM3-associated disorder. By “reduction” in this context is meant a statistically significant or clinically significant decrease in such level. The reduction can be, for example, at least 5%, 10%, 15%, 20%, 25%, 30%, 35%, 40%, 45%, 50%, 55%, 60%, 65%, 70%, 75%, 80%, 85%, 90%, 95%, or about 100%.

[0691] Efficacy of treatment or prevention of disease can be assessed, for example by measuring disease progression, disease remission, symptom severity, reduction in pain, quality of life, dose of a medication required to sustain a treatment effect, level of a disease marker or any other measurable parameter appropriate for a given disease being treated or targeted for prevention. It is well within the ability of one skilled in the art to monitor efficacy of treatment or prevention by measuring any one of such parameters, or any combination of parameters. For example, efficacy of treatment of an ABLIM3-associated disorder may be assessed, for example, by periodic monitoring of a subject's marker's and/or symptoms. Comparisons of the later readings with the initial readings provide a physician an indication of whether the treatment is effective. It is well within the ability of one skilled in the art to monitor efficacy of treatment or prevention by measuring any one of such parameters, or any combination of parameters. In connection with the administration of an RNAi agent targeting ABLIM3 or pharmaceutical composition thereof, “effective against” an ABLIM3-associated disorder indicates that administration in a clinically appropriate manner results in a beneficial effect for at least a statistically significant fraction of patients, such as an improvement of symptoms, a cure, a reduction in disease, extension of life, improvement in quality of life, or other effect generally recognized as positive by medical doctors familiar with treating ABLIM3-associated disorders and the related causes.

[0692] A treatment or preventive effect is evident when there is a statistically significant improvement in one or more parameters of disease status, or by a failure to worsen or to develop symptoms where they would otherwise be anticipated. As an example, a favorable change of at least 10% in a measurable parameter of disease, and preferably at least 20%, 30%, 40%, 50% or more can be indicative of effective treatment. Efficacy for a given RNAi agent drug or formulation of that drug can also be judged using an experimental animal model for the given disease as known in the art. When using an experimental animal model, efficacy of treatment is evidenced when a statistically significant reduction in a marker or symptom is observed.

[0693] Alternatively, the efficacy can be measured by a reduction in the severity of disease as determined by one skilled in the art of diagnosis based on a clinically accepted disease severity grading scale. Any positive change resulting in e.g., lessening of severity of disease measured using the appropriate scale, represents adequate treatment using an RNAi agent or RNAi agent formulation as described herein.

[0694] In certain embodiments, subjects can be administered a therapeutic amount of dsRNA, such as about 0.01 mg/kg to about 200 mg/kg. In other embodiments, subjects can be administered a therapeutic amount of dsRNA, such as about 0.01 mg/kg to about 500 mg/kg. In yet other embodiments, subjects can be administered a therapeutic amount of dsRNA of about 500 mg/kg or more.

[0695] The RNAi agent can be administered intrathecally, via intravitreal injection, or by intravenous infusion over a period of time, on a regular basis. In certain embodiments, after an initial treatment regimen, the treatments can be administered on a less frequent basis. Administration of the RNAi agent can reduce ABLIM3 levels, e.g., in a cell, tissue, blood, CSF sample or other compartment of the patient.

[0696] Before administration of a full dose of the RNAi agent, patients can be administered a smaller dose, such as a 5% infusion reaction, and monitored for adverse effects, such as an allergic reaction. In another example, the patient can be monitored for unwanted immunostimulatory effects, such as increased cytokine (e.g., TNF-alpha or INF-alpha) levels.

[0697] Alternatively, the RNAi agent can be administered subcutaneously, i.e., by subcutaneous injection. One or more injections may be used to deliver the desired, e.g., monthly dose of RNAi agent to a subject. The injections may be repeated over a period of time. The administration may be repeated on a regular basis. In certain embodiments, after an initial treatment regimen, the treatments can be administered on a less frequent basis. A repeat-dose regimen may include administration of a therapeutic amount of RNAi agent on a regular basis, such as monthly or extending to once a quarter, twice per year, once per year. In certain embodiments, the RNAi agent is administered about once per month to about once per quarter (i.e., about once every three months).

[0698] Unless otherwise defined, all technical and scientific terms used herein have the same meaning as commonly understood by one of ordinary skill in the art to which this invention belongs. Although methods and materials similar or equivalent to those described herein can be used in the practice or testing of the RNAi agents and methods featured in the invention, suitable methods and materials are described below. All publications, patent applications, patents, and other references mentioned herein are incorporated by reference in their entirety. In case of conflict, the present specification, including definitions, will control. In addition, the materials, methods, and examples are illustrative only and not intended to be limiting.

[0699] An informal Sequence Listing is filed herewith and forms part of the specification as filed.

### EXAMPLES

### Example 1. iRNA Synthesis

### Source of Reagents

[0700] Where the source of a reagent is not specifically given herein, such reagent can be obtained from any supplier of reagents for molecular biology at a quality/purity standard for application in molecular biology.

siRNA Design

[0701] siRNAs targeting the human Ablim3 gene (human: NCBI refseqID NM_001301015.3; NCBI GeneID: 22885) were designed using custom R and Python scripts. The human NM_001301015.3 REFSEQ mRNA has a length of 4452 bases.

[0702] A detailed list of the unmodified Ablim3 sense and antisense strand nucleotide sequences is shown in Table 3. A detailed list of the modified Ablim3 sense and antisense strand nucleotide sequences is shown in Table 4.

[0703] It is to be understood that, throughout the application, a duplex name without a decimal is equivalent to a duplex name with a decimal which merely references the batch number of the duplex. For example, AD-1810068 is equivalent to AD-1810068.1.

siRNA Synthesis

[0704] siRNAs were synthesized and annealed using routine methods known in the art.

[0705] Briefly, siRNA sequences were synthesized at 1 μmol scale on a Mermade 192 synthesizer (BioAutomation) using the solid support mediated phosphoramidite chemistry. The solid support was controlled pore glass (500 A) loaded with custom GalNAc ligand or universal solid support (AM biochemical). Ancillary synthesis reagents, 2′-F and 2′-O-Methyl RNA and deoxy phosphoramidites were obtained from Thermo-Fisher (Milwaukee, WI) and Hongene (China). 2′F 2′-O-Methyl, GNA (glycol nucleic acids), 5′ phosphate and other modifications were introduced using the corresponding phosphoramidites. Synthesis of 3′ GalNAc conjugated single strands was performed on a GalNAc modified CPG support. Custom CPG universal solid support was used for the synthesis of antisense single strands. Coupling time for all phosphoramidites (100 mM in acetonitrile) was 5 minutes employing 5-Ethylthio-1H-tetrazole (ETT) as activator (0.6 M in acetonitrile). Phosphorothioate linkages were generated using a 50 mM solution of 3-((Dimethylamino-methylidene)amino)-3H-1,2,4-dithiazole-3-thione (DDTT, obtained from Chemgenes (Wilmington, MA, USA)) in anhydrous acetonitrile/pyridine (1:1 v/v). Oxidation time was 3 minutes. All sequences were synthesized with final removal of the DMT group (“DMT off”).

[0706] Upon completion of the solid phase synthesis, oligoribonucleotides were cleaved from the solid support and deprotected in sealed 96 deep well plates using 200 μL Aqueous Methylamine reagents at 60° C. for 20 minutes. For sequences containing 2′ ribo residues (2′-OH) that are protected with a tert-butyl dimethyl silyl (TBDMS) group, a second step deprotection was performed using TEA·3HF (triethylanine trihydro fluoride) reagent. To the methylamine deprotection solution, 200 μL of dimethyl sulfoxide (DMSO) and 300 μL TEA·3HF reagent was added and the solution was incubated for additional 20 minutes at 60° C. At the end of cleavage and deprotection step, the synthesis plate was allowed to come to room temperature and was precipitated by addition of 1 mL of acetonitrile:ethanol mixture (9:1). The plates were cooled at −80° C. for 2 hours, supernatant decanted carefully with the aid of a multi-channel pipette. The oligonucleotide pellet was re-suspended in 20 mM NaOAc buffer and were desalted using a 5 mL HiTrap size exclusion column (GE Healthcare) on an AKTA Purifier System equipped with an A905 autosampler and a Frac 950 fraction collector. Desalted samples were collected in 96-well plates. Samples from each sequence were analyzed by LC-MS to confirm the identity, UV (260 nm) for quantification and a selected set of samples by IEX chromatography to determine purity.

[0707] Annealing of single strands was performed on a Tecan liquid handling robot. Equimolar mixture of sense and antisense single strands were combined and annealed in 96 well plates. After combining the complementary single strands, the 96-well plate was sealed tightly and heated in an oven at 100° C. for 10 minutes and allowed to come slowly to room temperature over a period 2-3 hours. The concentration of each duplex was normalized to 10 M in 1×PBS and then submitted for in vitro screening assays.

### Example 2. In Vitro Screening Methods

### Cell Culture and 384-Well Transfections

[0708] Cos-7 (ATCC) are transfected by adding 5 μl of 1 ng/KL, diluted in Opti-MEM, C9orf72 intron 1 psiCHECK2 vector (Blue Heron Biotechnology), 4.9 μL of Opti-MEM plus 0.1 μL of Lipofectamine 2000 per well (Invitrogen. Carlsbad CA. cat #11668-019) to 5 μL of siRNA duplexes per well, with 4 replicates of each siRNA duplex, into a 384-well plate, and incubated at room temperature for 15 minutes. Thirty-five L of Dulbecco's Modified Eagle Medium (ThermoFisher) containing ˜5×10³ cells are then added to the siRNA mixture. Cells are incubated for 48 hours followed by Firefly (transfection control) and Renilla (fused to target sequence) luciferase measurements. Three dose experiments are performed at 10 nM, 1 nM, and 0.1 nM.

[0709] BE(2)-C (ATCC) are transfected by adding 4.9 μL of Opti-MEM plus 0.1 μl of RNAiMAX per well (Invitrogen, Carlsbad CA. cat #13778-150) to 5 μL of siRNA duplexes per well, with 4 replicates of each siRNA duplex, into a 384-well plate, and incubated at room temperature for 15 minutes. Forty L of 1:1 mixture of Minimum Essential Medium and F12 Medium (ThermoFisher) containing ˜5×10³ cells are then added to the siRNA mixture. Cells are incubated for 48 hours prior to RNA purification. Three dose experiments are performed at 10 nM, 1 nM, and 0.1 nM.

Total RNA Isolation Using DYNABEADS mRNA Isolation Kit (Invitrogen™, Part #: 610-12)

[0710] Cells are lysed in 75 μL of Lysis/Binding Buffer containing 3 μL of beads per well and are mixed for 10 minutes on an electrostatic shaker. The washing steps are automated on a Biotek EL406, using a magnetic plate support. Beads are washed (in 90 μL) once in Buffer A, once in Buffer B, and twice in Buffer E, with aspiration steps in between. Following a final aspiration, complete 10 μL RT mixture is added to each well, as described below.

cDNA Synthesis Using ABI High Capacity cDNA Reverse Transcription Kit (Applied Biosystems, Foster City, CA, Cat #4368813)

[0711] A master mix of 1 μL 10× Buffer, 0.4 μL 25×dNTPs, 1 μL Random primers, 0.5 μL Reverse Transcriptase, 0.5 μL RNase inhibitor and 6.6 μL of H₂O per reaction is added per well. Plates are sealed, are agitated for 10 minutes on an electrostatic shaker, and then are incubated at 37° C. for 2 hours. Following this, the plates are agitated at 80° C. for 8 minutes.

### Real Time PCR

[0712] Two microliter (μL) of cDNA is added to a master mix containing 0.5 μL of human GAPDH TaqMan Probe and 0.5 μL human Ablim3 probe, 2 μL nuclease-free water and 5 μL Lightcycler 480 probe master mix (Roche Cat #04887301001) per well in a 384 well plates (Roche cat #04887301001). Real time PCR is done in a LightCycler480 Real Time PCR system (Roche). Each duplex is tested at least two times and data are normalized to cells transfected with a non-targeting control siRNA. To calculate relative fold change, real time data are analyzed using the ΔΔCt method and are normalized to assays performed with cells transfected with a non-targeting control siRNA.

### Example 3. Single Dose In Vitro Screening of ABLIM3 siRNAs

[0713] Hepa1-6 mouse hepatoma cells were transfected by adding 5 μL of 1 ng/μL of each siRNA duplex diluted in Opti-MEM, 100 ng V190 or V191 human ABLIM3 reporter construct, plus 0.5 μl of Lipofectamine 2000 to an individual well in a 96-well plate, with 4 replicates of each siRNA duplex. The mixture was incubated at room temperature for 15 minutes. One-hundred μL of complete growth media without antibiotic containing ˜2×10⁴ Hepa1-6 cells was then added to the siRNA mixture. Cells were incubated for 24 hours followed by Firefly (transfection control) and Renilla (fused to target sequence) luciferase measurements. A single dose experiment was performed at 1 nM final duplex concentration. The results are shown in Table 5 and are presented as the average percent ABLIM3 mRNA remaining as compared to a negative control. A positive control of Rluc directed siRNA was also performed.

[0714] It is expressly contemplated that nucleotides 3042-3081, 3420-3457, 4223-4261, 726-763, 1080-1137, 1342-1379, 1910-1955, 2167-2204, 480-520, 1080-1122, 1622-1665, 1744-1787, 2323-2363, 540-578, 1175-1212, 274-313, 349-401, or 2518-2555 of NM_001301015.3 comprise hotspot regions. These regions are targeted by AD-1809702, AD-1809719, AD-1810038, AD-1810053, AD-1810676, AD-1810692, AD-1807904, AD-1807919, AD-1808238, AD-1808258, AD-1808273, AD-1808418, AD-1808433, AD-1808842, AD-1808865, AD-1809051, AD-1809066, AD-1807707, AD-1807725, AD-1808628, AD-1808649, AD-1808727, AD-1808748, AD-1809187, AD-1809205, AD-1807764, AD-1807780, AD-1808312, AD-1808327, AD-1807561, AD-1807578, AD-1807616, AD-1807631, AD-1807646, AD-1809354, and AD-1809369. Table 6 provides a summary of the hotspot regions in NM 001301015.3 and the duplexes that target the hotspot regions.

TABLE 2
Abbreviations of nucleotide monomers used in nucleic acid sequence representation. It will
be understood that these monomers, when present in an oligonucleotide, are mutually linked by 5′-3′-
phosphodiester bonds; and it is understood that when the nucleotide contains a 2′-fluoro modification,
then the fluoro replaces the hydroxy at that position in the parent nucleotide (i.e., it is a 2′-deoxy-2′-
fluoronucleotide).

| Abbreviation | Nucleotide(s) |
|---|---|
| A | Adenosine-3′-phosphate |
| Ab | beta-L-adenosine-3′-phosphate |
| Abs | beta-L-adenosine-3′-phosphorothioate |
| Af | 2′-fluoroadenosine-3′-phosphate |
| Afs | 2′-fluoroadenosine-3′-phosphorothioate |
| As | adenosine-3′-phosphorothioate |
| (A2p) | adenosine-2′-phosphate |
| (A2ps) | adenosine-2′-phosphorothioate |
| C | cytidine-3′-phosphate |
| Cb | beta-L-cytidine-3′-phosphate |
| Cbs | beta-L-cytidine-3′-phosphorothioate |
| Cf | 2′-fluorocytidine-3′-phosphate |
| Cfs | 2′-fluorocytidine-3′-phosphorothioate |
| Cs | cytidine-3′-phosphorothioate |
| (C2p) | cytidine-2′-phosphate |
| (C2ps) | cytidine-2′-phosphorothioate |
| G | guanosine-3′-phosphate |
| Gb | beta-L-guanosine-3′-phosphate |
| Gbs | beta-L-guanosine-3′-phosphorothioate |
| Gf | 2′-fluoroguanosine-3′-phosphate |
| Gfs | 2′-fluoroguanosine-3′-phosphorothioate |
| Gs | guanosine-3′-phosphorothioate |
| (G2p) | guanosine-2′-phosphate |
| (G2ps) | guanosine-2′-phosphorothioate |
| T | 5′-methyluridine-3′-phosphate |
| Tf | 2′-fluoro-5-methyluridine-3′-phosphate |
| Tfs | 2′-fluoro-5-methyluridine-3′-phosphorothioate |
| Ts | 5-methyluridine-3′-phosphorothioate |
| U | Uridine-3′-phosphate |
| Uf | 2′-fluorouridine-3′-phosphate |
| Ufs | 2′-fluorouridine-3′-phosphorothioate |
| Us | uridine-3′-phosphorothioate |
| (U2p) | uridine-2′-phosphate |
| (U2ps) | uridine-2′-phosphorothioate |
| N | any nucleotide, modified or unmodified |
| a | 2′-O-methyladenosine-3′-phosphate |
| as | 2′-O-methyladenosine-3′-phosphorothioate |
| c | 2′-O-methylcytidine-3′-phosphate |
| cs | 2′-O-methylcytidine-3′-phosphorothioate |
| g | 2′-O-methylguanosine-3′-phosphate |
| gs | 2′-O-methylguanosine-3′-phosphorothioate |
| t | 2′-O-methyl-5-methyluridine-3′-phosphate |
| ts | 2′-O-methyl-5-methyluridine-3′-phosphorothioate |
| u | 2′-O-methyluridine-3′-phosphate |
| us | 2′-O-methyluridine-3′-phosphorothioate |
| s | phosphorothioate linkage |
| L96 | N-[tris(GalNAc-alkyl)-amido-dodecanoyl)]-4-hydroxyprolinol |
| | [Hyp-(GalNAc-alkyl)3] |
| | [chemical structure] |
| (Agn) | Adenosine-glycol nucleic acid (GNA) S-Isomer |
| (Cgn) | Cytidine-glycol nucleic acid (GNA) S-Isomer |
| (Ggn) | Guanosine-glycol nucleic acid (GNA) S-Isomer |
| (Tgn) | Thymidine-glycol nucleic acid (GNA) S-Isomer |
| P | Phosphate |
| VP | Vinyl-phosphonate |
| dA | 2′-deoxyadenosine-3′-phosphate |
| dAs | 2′-deoxyadenosine-3′-phosphorothioate |
| dC | 2′-deoxycytidine-3′-phosphate |
| dCs | 2′-deoxycytidine-3′-phosphorothioate |
| dG | 2′-deoxyguanosine-3′-phosphate |
| dGs | 2′-deoxyguanosine-3′-phosphorothioate |
| dT | 2′-deoxythymidine-3′-phosphate |
| dTs | 2′-deoxythymidine-3′-phosphorothioate |
| dU | 2′-deoxyuridine |
| dUs | 2′-deoxyuridine-3′-phosphorothioate |

TABLE 3
Unmodified Sense and Antisense Strand Sequences of Human ABLIM3 dsRNA Agents

| | | | Range in | | | Range in |
|---|---|---|---|---|---|---|
| Duplex | Sense Sequence | SEQ ID | NM_ | Antisense Sequence | SEQ ID | NM_ |
| Name | 5′ to 3′ | NO: | 001301015.3 | 5′ to 3′ | NO: | 001301015.3 |
| AD- | CCGGGAUUCCAAUCUG | 8 | 82-102 | UUCCUCAGAUUGGA | 143 | 80-102 |
| 1807455 | AGGAA | | | AUCCCGGGC | | |
| AD- | CUCCUUCUCCUUGCUC | 9 | 134-154 | UGUGAGAGCAAGGA | 144 | 132-154 |
| 1807481 | UCACA | | | GAAGGAGGC | | |
| AD- | CACCUGAGGAUACAGA | 10 | 232-252 | UCAGCUCUGUAUCCU | 145 | 230-252 |
| 1807539 | GCUGA | | | CAGGUGCU | | |
| AD- | CAGGUGAUGAGUGAG | 11 | 276-296 | UCGAACCUCACUCAU | 146 | 274-296 |
| 1807561 | GUUCGA | | | CACCUGGG | | |
| AD- | UCGAAGAACGGAAGA | 12 | 293-313 | UUUAAAUCUUCCGU | 147 | 291-313 |
| 1807578 | UUUAAA | | | UCUUCGAAC | | |
| AD- | CCUCCGUAUUGAAUGA | 13 | 326-346 | UUCUUUCAUUCAAU | 148 | 324-346 |
| 1807591 | AAGAA | | | ACGGAGGCC | | |
| AD- | UGCAAAGACAUCACCA | 14 | 351-371 | UUUCAUGGUGAUGU | 149 | 349-371 |
| 1807616 | UGAAA | | | CUUUGCACU | | |
| AD- | AUGAACACUAGCAUUC | 15 | 366-386 | UUAAGGAAUGCUAG | 150 | 364-386 |
| 1807631 | CUUAA | | | UGUUCAUGG | | |
| AD- | CCUUAUCAGCAGAAUC | 16 | 381-401 | UUAAGGAUUCUGCU | 151 | 379-401 |
| 1807646 | CUUAA | | | GAUAAGGAA | | |
| AD- | AGCUCCAAUGUCAUCC | 17 | 414-434 | UCACUGGAUGACAU | 152 | 412-434 |
| 1807659 | AGUGA | | | UGGAGCUGC | | |
| AD- | CAACCACUUCCACAUC | 18 | 482-502 | UAUCUGAUGUGGAA | 153 | 480-502 |
| 1807707 | AGAUA | | | GUGGUUGUU | | |
| AD- | AUGCUUCACCUGUCAA | 19 | 500-520 | UAUACUUGACAGGU | 154 | 498-520 |
| 1807725 | GUAUA | | | GAAGCAUCU | | |
| AD- | AGGCUUCUUCUUCAAG | 20 | 542-562 | UGGUUCUUGAAGAA | 155 | 540-562 |
| 1807764 | AACCA | | | GAAGCCUGA | | |
| AD- | AACCAGGAGUACAUCU | 21 | 558-578 | UGUGCAGAUGUACU | 156 | 556-578 |
| 1807780 | GCACA | | | CCUGGUUCU | | |
| AD- | GACUACCAGCAACUCU | 22 | 582-602 | UCCAUAGAGUUGCU | 157 | 580-602 |
| 1807804 | AUGGA | | | GGUAGUCCU | | |
| AD- | GGGACUUCAUCACAGG | 23 | 622-642 | UUUCGCCUGUGAUG | 158 | 620-642 |
| 1807844 | CGAAA | | | AAGUCCCGG | | |
| AD- | CAAGUGCUUCGUGUGC | 24 | 674-694 | UAGCUGCACACGAA | 159 | 672-694 |
| 1807870 | AGCUA | | | GCACUUGGG | | |
| AD- | CUUGUGCAGGAAGCCU | 25 | 692-712 | UGGAAAGGCUUCCU | 160 | 690-712 |
| 1807888 | UUCCA | | | GCACAAGCU | | |
| AD- | CAUUGGAGACAAGGU | 26 | 713-733 | UAGGUCACCUUGUC | 161 | 711-733 |
| 1807889 | GACCUA | | | UCCAAUGGG | | |
| AD- | GACCUUCAGCGGUAAA | 27 | 728-748 | UAUUCUUUACCGCU | 162 | 726-748 |
| 1807904 | GAAUA | | | GAAGGUCAC | | |
| AD- | AGAAUGUGUGUGCCA | 28 | 743-763 | UACGUUUGGCACAC | 163 | 741-763 |
| 1807919 | AACGUA | | | ACAUUCUUU | | |
| AD- | CAGCAGUAAGCCCAUC | 29 | 779-799 | UUCUUGAUGGGCUU | 164 | 777-799 |
| 1807955 | AAGAA | | | ACUGCUGGC | | |
| AD- | CUGCUUCAAGUGCCAG | 30 | 887-907 | UAGGUCUGGCACUU | 165 | 885-907 |
| 1808063 | ACCUA | | | GAAGCAGCU | | |
| AD- | GAUGGUGUUCCAUACU | 31 | 942-962 | UUCACAGUAUGGAA | 166 | 940-962 |
| 1808098 | GUGAA | | | CACCAUCCU | | |
| AD- | UGGCAUUAAAUGUGA | 32 | 983-1003 | UAAGUCUCACAUUU | 167 | 981-1003 |
| 1808139 | GACUUA | | | AAUGCCAAA | | |
| AD- | UUGUGACCGAUACAUC | 33 | 1001-1021 | UCACUGAUGUAUCG | 168 | 999-1021 |
| 1808157 | AGUGA | | | GUCACAAGU | | |
| AD- | CCACCAGAUGUUCACC | 34 | 1082-1102 | UCUUCGGUGAACAU | 169 | 1080-1102 |
| 1808238 | GAAGA | | | CUGGUGGCA | | |
| AD- | GAGAGGAAAUGUACC | 35 | 1102-1122 | UUGUGAGGUACAUU | 170 | 1100-1122 |
| 1808258 | UCACAA | | | UCCUCUCCU | | |
| AD- | UCACAGGUUCCGAGGU | 36 | 1117-1137 | UCCAAACCUCGGAAC | 171 | 1115-1137 |
| 1808273 | UUGGA | | | CUGUGAGG | | |
| AD- | UAAAGCAUAGACGGAC | 37 | 1177-1197 | UAGAUGUCCGUCUA | 172 | 1175-1197 |
| 1808312 | AUCUA | | | UGCUUUAAC | | |
| AD- | CAUCUGAAACCUCCAU | 38 | 1192-1212 | UUGAGAUGGAGGUU | 173 | 1190-1212 |
| 1808327 | CUCAA | | | UCAGAUGUC | | |
| AD- | CGAGUCAUCUGCGCUA | 39 | 1242-1262 | UACUUUAGCGCAGA | 174 | 1240-1262 |
| 1808356 | AAGUA | | | UGACUCGGU | | |
| AD- | GAGAUCCUUAAUUACA | 40 | 1269-1289 | UUCUUUGUAAUUAA | 175 | 1267-1289 |
| 1808383 | AAGAA | | | GGAUCUCAU | | |
| AD- | GUCUAUCUACGAGGUA | 41 | 1313-1333 | UGUUGUACCUCGUA | 176 | 1311-1333 |
| 1808407 | CAACA | | | GAUAGACUU | | |
| AD- | AUUUCCUAUGAGCCUC | 42 | 1344-1364 | UGAAUGAGGCUCAU | 177 | 1342-1364 |
| 1808418 | AUUCA | | | AGGAAAUGA | | |
| AD- | CAUUCCAGAUACAUGU | 43 | 1359-1379 | UUCGGACAUGUAUC | 178 | 1357-1379 |
| 1808433 | CCGAA | | | UGGAAUGAG | | |
| AD- | UCCGACGAGAUGCUGG | 44 | 1374-1394 | UCUCUCCAGCAUCUC | 179 | 1372-1394 |
| 1808448 | AGAGA | | | GUCGGACA | | |
| AD- | AGUCGCUGGGAACAUU | 45 | 1408-1428 | UAGAUAAUGUUCCC | 180 | 1406-1428 |
| 1808482 | AUCUA | | | AGCGACUCU | | |
| AD- | CAGGACAUCUACGAGA | 46 | 1437-1457 | UAGGUUCUCGUAGA | 181 | 1435-1457 |
| 1808511 | ACCUA | | | UGUCCUGGG | | |
| AD- | UCACCACUACUACCGC | 47 | 1550-1570 | UCAGAGCGGUAGUA | 182 | 1548-1570 |
| 1808561 | UCUGA | | | GUGGUGAGG | | |
| AD- | CAUACCAUAGCCAGUU | 48 | 1594-1614 | UAUCUAACUGGCUA | 183 | 1592-1614 |
| 1808598 | AGAUA | | | UGGUAUGGA | | |
| AD- | CCACUCCAACCUCUUA | 49 | 1624-1644 | UCUGGUAAGAGGUU | 184 | 1622-1644 |
| 1808628 | CCAGA | | | GGAGUGGAG | | |
| AD- | CUCCCAAGCACUUUCA | 50 | 1645-1665 | UGAUGUGAAAGUGC | 185 | 1643-1665 |
| 1808649 | CAUCA | | | UUGGGAGCC | | |
| AD- | GACAGUAACAUCUACC | 51 | 1674-1694 | UUUCCGGUAGAUGU | 186 | 1672-1694 |
| 1808678 | GGAAA | | | UACUGUCUC | | |
| AD- | UGGUGAUUUGUCUAC | 52 | 1715-1735 | UUUGCUGUAGACAA | 187 | 1713-1735 |
| 1808698 | AGCAAA | | | AUCACCAUG | | |
| AD- | ACAAGUGAAGACAUCA | 53 | 1746-1766 | UUGGCUGAUGUCUU | 188 | 1744-1766 |
| 1808727 | GCCAA | | | CACUUGUUU | | |
| AD- | ACCUCCAAGUACAGUC | 54 | 1767-1787 | UAUGGGACUGUACU | 189 | 1765-1787 |
| 1808748 | CCAUA | | | UGGAGGUCU | | |
| AD- | UCGGAGUCUGAGUACU | 55 | 1812-1832 | UGUCCAGUACUCAG | 190 | 1810-1832 |
| 1808773 | GGACA | | | ACUCCGAAG | | |
| AD- | AGCCAGAAGGUUCUCG | 56 | 1859-1879 | UCAGACGAGAACCU | 191 | 1857-1879 |
| 1808789 | UCUGA | | | UCUGGCUCG | | |
| AD- | GAGGAGGAUGAUUUU | 57 | 1884-1904 | UCGGUCAAAAUCAU | 192 | 1882-1904 |
| 1808814 | GACCGA | | | CCUCCUCUC | | |
| AD- | ACAAGCUCCAAAGUGG | 58 | 1912-1932 | UAAUUCCACUUUGG | 193 | 1910-1932 |
| 1808842 | AAUUA | | | AGCUUGUGC | | |
| AD- | CGGCUGAUUCUGAAGG | 59 | 1935-1955 | UUCUUCCUUCAGAA | 194 | 1933-1955 |
| 1808865 | AAGAA | | | UCAGCCGGC | | |
| AD- | AGCUCCUAUGCAGAUC | 60 | 1971-1991 | UCAGGGAUCUGCAU | 195 | 1969-1991 |
| 1808901 | CCUGA | | | AGGAGCUCG | | |
| AD- | UGGCUAUGAGAUGUCC | 61 | 2039-2059 | UUGAGGGACAUCUC | 196 | 2037-2059 |
| 1808941 | CUCAA | | | AUAGCCAGC | | |
| AD- | UCCUCUCAUCUCCAAA | 62 | 2096-2116 | UCAGAUUUGGAGAU | 197 | 2094-2116 |
| 1808978 | UCUGA | | | GAGAGGAUC | | |
| AD- | GCCUACCGAAGAAAUG | 63 | 2127-2147 | UAGCCCAUUUCUUCG | 198 | 2125-2147 |
| 1809009 | GGCUA | | | GUAGGCAG | | |
| AD- | CUCUUCCACUACGACA | 64 | 2169-2189 | UAUGCUGUCGUAGU | 199 | 2167-2189 |
| 1809051 | GCAUA | | | GGAAGAGGU | | |
| AD- | AGCAUGAACGCAGUCA | 65 | 2184-2204 | UCAGUUGACUGCGU | 200 | 2182-2204 |
| 1809066 | ACUGA | | | UCAUGCUGU | | |
| AD- | ACAAGAUCUACCCUUA | 66 | 2218-2238 | UUUCAUAAGGGUAG | 201 | 2216-2238 |
| 1809080 | UGAAA | | | AUCUUGUAC | | |
| AD- | UGGUGACUACAAGAG | 67 | 2245-2265 | UUCUUCCUCUUGUA | 202 | 2243-2265 |
| 1809107 | GAAGAA | | | GUCACCAGC | | |
| AD- | GCCCAAGGAUGUAGAC | 68 | 2273-2293 | UUCCUGUCUACAUCC | 203 | 2271-2293 |
| 1809135 | AGGAA | | | UUGGGCAG | | |
| AD- | UUCUACCAAGUCUUUG | 69 | 2325-2345 | UAUGCCAAAGACUU | 204 | 2323-2345 |
| 1809187 | GCAUA | | | GGUAGAACU | | |
| AD- | AUGACCAUCUCUGAGU | 70 | 2343-2363 | UUCAAACUCAGAGA | 205 | 2341-2363 |
| 1809205 | UUGAA | | | UGGUCAUGC | | |
| AD- | AAUGAACUGAAGAAG | 71 | 2385-2405 | UGCUUGCUUCUUCA | 206 | 2383-2405 |
| 1809246 | CAAGCA | | | GUUCAUUCC | | |
| AD- | AGGCUCUAUAAAUAU | 72 | 2422-2442 | UCAUAUAUAUUUAU | 207 | 2420-2442 |
| 1809283 | AUAUGA | | | AGAGCCUCU | | |
| AD- | AUGUAAAAUCUCUCUA | 73 | 2459-2479 | UUCAGUAGAGAGAU | 208 | 2457-2479 |
| 1809293 | CUGAA | | | UUUACAUAU | | |
| AD- | CGGUAUAAUCCUCUCU | 74 | 2483-2503 | UCACAAGAGAGGAU | 209 | 2481-2503 |
| 1809317 | UGUGA | | | UAUACCGAG | | |
| AD- | UGCCAUGAGACUUGCU | 75 | 2520-2540 | UGAAAAGCAAGUCU | 210 | 2518-2540 |
| 1809354 | UUUCA | | | CAUGGCAGG | | |
| AD- | UUUUCUGUACUGUCAG | 76 | 2535-2555 | UUUGCCUGACAGUA | 211 | 2533-2555 |
| 1809369 | GCAAA | | | CAGAAAAGC | | |
| AD- | GUCAUCGAGAUAUUU | 77 | 2561-2581 | UCAUAAAAAUAUCU | 212 | 2559-2581 |
| 1809395 | UUAUGA | | | CGAUGACGU | | |
| AD- | UUACUUUCUCUUUUCU | 78 | 2585-2605 | UACUUAGAAAAGAG | 213 | 2583-2605 |
| 1809414 | AAGUA | | | AAAGUAAGG | | |
| AD- | CUGAAACAUCUGUCCU | 79 | 2667-2687 | UAGUUAGGACAGAU | 214 | 2665-2687 |
| 1809456 | AACUA | | | GUUUCAGUA | | |
| AD- | CAACUCUCUUUCCUAA | 80 | 2703-2723 | UUUCUUUAGGAAAG | 215 | 2701-2723 |
| 1809472 | JAGAAA | | | AGAGUUGGA | | |
| AD- | UGAAGAAGUCUCUCUU | 81 | 2729-2749 | UAGAGAAGAGAGAC | 216 | 2727-2749 |
| 1809498 | CUCUA | | | UUCUUCAGG | | |
| AD- | UUUCUUAAAUUUCUA | 82 | 2764-2784 | UAGCCCUAGAAAUU | 217 | 2762-2784 |
| 1809511 | GGGCUA | | | UAAGAAAGG | | |
| AD- | CUGACCAUGUGGUUUC | 83 | 2788-2808 | UUGUGGAAACCACA | 218 | 2786-2808 |
| 1809535 | CACAA | | | UGGUCAGCA | | |
| AD- | CUCCCAUGGGAAGAUC | 84 | 2830-2850 | UUGCAGAUCUUCCCA | 219 | 2828-2850 |
| 1809550 | UGCAA | | | UGGGAGGG | | |
| AD- | AAAUCAGUGAGCACCU | 85 | 2861-2881 | UUCAAAGGUGCUCA | 220 | 2859-2881 |
| 1809561 | UUGAA | | | CUGAUUUGG | | |
| AD- | CCACGAAGAACUUUCU | 86 | 2885-2905 | UGUUGAGAAAGUUC | 221 | 2883-2905 |
| 1809585 | CAACA | | | UUCGUGGGC | | |
| AD- | GCAAUGCAGUUAAAA | 87 | 2937-2957 | UCACCCUUUUAACUG | 222 | 2935-2957 |
| 1809596 | GGGUGA | | | CAUUGCCC | | |
| AD- | GCCUCAAAUCUAGUCA | 88 | 2958-2978 | UGUAAUGACUAGAU | 223 | 2956-2978 |
| 1809617 | UUACA | | | UUGAGGCUC | | |
| AD- | UUACACCAGUCAACAG | 89 | 2974-2994 | UACUUCUGUUGACU | 224 | 2972-2994 |
| 1809633 | AAGUA | | | GGUGUAAUG | | |
| AD- | CUCCUCAGCUCCUUAA | 90 | 3011-3031 | UAGGGUUAAGGAGC | 225 | 3009-3031 |
| 1809670 | CCCUA | | | UGAGGAGAG | | |
| AD- | UGGAUUGUAACCUCUC | 91 | 3044-3064 | UAAGGGAGAGGUUA | 226 | 3042-3064 |
| 1809702 | CCUUA | | | CAAUCCAGG | | |
| AD- | CUUGUCCAAAUCUAGG | 92 | 3061-3081 | UGAAUCCUAGAUUU | 227 | 3059-3081 |
| 1809719 | AUUCA | | | GGACAAGGG | | |
| AD- | UCCUGGUAGGAAAAG | 93 | 3079-3099 | UUUUUCCUUUUCCU | 228 | 3077-3099 |
| 1809737 | GAAAAA | | | ACCAGGAAU | | |
| AD- | UCCCUCCACCACUUCC | 94 | 3110-3130 | UAGUUGGAAGUGGU | 229 | 3108-3130 |
| 1809757 | AACUA | | | GGAGGGAAG | | |
| AD- | CUGGACUUGGAGAACC | 95 | 3146-3166 | UCUCUGGUUCUCCAA | 230 | 3144-3166 |
| 1809773 | AGAGA | | | GUCCAGGU | | |
| AD- | CACCUGUUAGAAUCAG | 96 | 3203-3223 | UAGCUCUGAUUCUA | 231 | 3201-3223 |
| 1809822 | AGCUA | | | ACAGGUGCC | | |
| AD- | GCUGCAGGAUUUCUUG | 97 | 3220-3240 | UGUCCCAAGAAAUCC | 232 | 3218-3240 |
| 1809839 | GGACA | | | UGCAGCUC | | |
| AD- | UUCCCUCUUUCAAGGA | 98 | 3279-3299 | UCUUCUCCUUGAAA | 233 | 3277-3299 |
| 1809895 | GAAGA | | | GAGGGAAGG | | |
| AD- | UGAUUGCAGCUUGUA | 99 | 3303-3323 | UAAGAAUACAAGCU | 234 | 3301-3323 |
| 1809919 | UUCUUA | | | GCAAUCAUG | | |
| AD- | UUUAGCCUUAUUACAA | 100 | 3321-3341 | UUAGAUUGUAAUAA | 235 | 3319-3341 |
| 1809937 | UCUAA | | | GGCUAAAGA | | |
| AD- | CUAUGUGCCUGACAAC | 101 | 3338-3358 | UUUGAGUUGUCAGG | 236 | 3336-3358 |
| 1809954 | UCAAA | | | CACAUAGAU | | |
| AD- | CUCCAACUGAACAACC | 102 | 3388-3408 | UGUCUGGUUGUUCA | 237 | 3386-3408 |
| 1810004 | AGACA | | | GUUGGAGCU | | |
| AD- | CAGACAACUCUCAUCA | 103 | 3407-3427 | UAGGAUGAUGAGAG | 238 | 3405-3427 |
| 1810023 | UCCUA | | | UUGUCUGUC | | |
| AD- | AUCCUCCAGAGAGAAA | 104 | 3422-3442 | UCUAUUUUCUCUCU | 239 | 3420-3442 |
| 1810038 | AUAGA | | | GGAGGAUGA | | |
| AD- | AAUAGGCCGUGUCUCA | 105 | 3437-3457 | UUCUUUGAGACACG | 240 | 3435-3457 |
| 1810053 | AAGAA | | | GCCUAUUUU | | |
| AD- | AAAGAAAGGUUCUUG | 106 | 3452-3472 | UUAGACCAAGAACC | 241 | 3450-3472 |
| 1810068 | GUCUAA | | | UUUCUUUGA | | |
| AD- | UGCUGCAAAGUUGGCC | 107 | 3532-3552 | UACAUGGCCAACUU | 242 | 3530-3552 |
| 1810127 | AUGUA | | | UGCAGCAGG | | |
| AD- | AUGUUUCACAGGGAA | 108 | 3548-3568 | UAAAGUUUCCCUGU | 243 | 3546-3568 |
| 1810143 | ACUUUA | | | GAAACAUGG | | |
| AD- | CUGCUUAUGAGAUUCC | 109 | 3579-3599 | UUUUUGGAAUCUCA | 244 | 3577-3599 |
| 1810174 | AAAAA | | | UAAGCAGCC | | |
| AD- | CAAAAUGAAGUGUUG | 110 | 3594-3614 | UUUGGCCAACACUUC | 245 | 3592-3614 |
| 1810189 | GCCAAA | | | AUUUUGGA | | |
| AD- | CCAUCCUGGAUUUUCC | 111 | 3626-3646 | UACUGGGAAAAUCC | 246 | 3624-3646 |
| 1810221 | CAGUA | | | AGGAUGGCC | | |
| AD- | GUGGCUUCCCUUCCUG | 112 | 3644-3664 | UCGAGCAGGAAGGG | 247 | 3642-3664 |
| 1810239 | CUCGA | | | AAGCCACUG | | |
| AD- | AAAGCUUAACCUCUCU | 113 | 3682-3702 | UGAGAAGAGAGGUU | 248 | 3680-3702 |
| 1810255 | UCUCA | | | AAGCUUUCU | | |
| AD- | CCAAACCUUUCACCUU | 114 | 3706-3726 | UAUUCAAGGUGAAA | 249 | 3704-3726 |
| 1810277 | GAAUA | | | GGUUUGGAG | | |
| AD- | UGAAUGGGUAAUGUU | 115 | 3721-3741 | UCACCAAACAUUACC | 250 | 3719-3741 |
| 1810292 | UGGUGA | | | CAUUCAAG | | |
| AD- | UGUUCCUUCUUGGAGA | 116 | 3746-3766 | UGGCUUCUCCAAGA | 251 | 3744-3766 |
| 1810296 | AGCCA | | | AGGAACAGC | | |
| AD- | GCCUUGAGUCGGACCA | 117 | 3763-3783 | UAAAAUGGUCCGAC | 252 | 3761-3783 |
| 1810313 | UUUUA | | | UCAAGGCUU | | |
| AD- | AAGGAUGAAGAAGUG | 118 | 3796-3816 | UAUUUUCACUUCUU | 253 | 3794-3816 |
| 1810345 | AAAAUA | | | CAUCCUUCC | | |
| AD- | AUGACAAUAAUGACUC | 119 | 3814-3834 | UUUGAGAGUCAUUA | 254 | 3812-3834 |
| 1810363 | UCAAA | | | UUGUCAUUU | | |
| AD- | ACAUGGCAAAUGUAG | 120 | 3849-3869 | UCAGUUCUACAUUU | 255 | 3847-3869 |
| 1810398 | AACUGA | | | GCCAUGUCA | | |
| AD- | CUGACUUAAAUUGAAC | 121 | 3866-3886 | UGUUUGUUCAAUUU | 256 | 3864-3886 |
| 1810415 | AAACA | | | AAGUCAGUU | | |
| AD- | ACCUCUGAUGUUGAGC | 122 | 3897-3917 | UAGGUGCUCAACAU | 257 | 3895-3917 |
| 1810446 | ACCUA | | | CAGAGGUGC | | |
| AD- | UGAAUACUGAGCACUG | 123 | 3919-3939 | UCAUUCAGUGCUCA | 258 | 3917-3939 |
| 1810468 | AAUGA | | | GUAUUCAGC | | |
| AD- | CAGGGAUAUGCCUACC | 124 | 3986-4006 | UUAUUGGUAGGCAU | 259 | 3984-4006 |
| 1810494 | AAUAA | | | AUCCCUGAG | | |
| AD- | AGGCAUGUACCCAAAC | 125 | 4018-4038 | UUUAUGUUUGGGUA | 260 | 4016-4038 |
| 1810526 | AUAAA | | | CAUGCCUUA | | |
| AD- | ACGGAUGUAAGGCAG | 126 | 4037-4057 | UACUUUCUGCCUUAC | 261 | 4035-4057 |
| 1810545 | AAAGUA | | | AUCCGUUA | | |
| AD- | AUCGGAGAAGGAAUG | 127 | 4058-4078 | UUUUCUCAUUCCUUC | 262 | 4056-4078 |
| 1810566 | AGAAAA | | | UCCGAUCA | | |
| AD- | GUGAUGUUAAUGAAA | 128 | 4084-4104 | UUGACUUUUCAUUA | 263 | 4082-4104 |
| 1810591 | AGUCAA | | | ACAUCACGC | | |
| AD- | AGUCAUAUGCAGCUAG | 129 | 4099-4119 | UUGCUCUAGCUGCA | 264 | 4097-4119 |
| 1810606 | AGCAA | | | UAUGACUUU | | |
| AD- | CUUUCUGGAAGAGAU | 130 | 4131-4151 | UAUGCAAUCUCUUCC | 265 | 4129-4151 |
| 1810638 | UGCAUA | | | AGAAAGCU | | |
| AD- | AUUCAGGAAGGAUCU | 131 | 4159-4179 | UUACAAAGAUCCUU | 266 | 4157-4179 |
| 1810666 | UUGUAA | | | CCUGAAUUU | | |
| AD- | AGAGGGAAGUCUGCU | 132 | 4225-4245 | UAACACAGCAGACU | 267 | 4223-4245 |
| 1810676 | GUGUUA | | | UCCCUCUGG | | |
| AD- | UGUUCUCAUGUAGGA | 133 | 4241-4261 | UUGACAUCCUACAU | 268 | 4239-4261 |
| 1810692 | UGUCAA | | | GAGAACACA | | |
| AD- | UCUCUUUUUGGCCAAU | 134 | 4276-4296 | UAGACAUUGGCCAA | 269 | 4274-4296 |
| 1810727 | GUCUA | | | AAAGAGAAG | | |
| AD- | UGUCUUUUCACUUUCC | 135 | 4291-4311 | UGUCAGGAAAGUGA | 270 | 4289-4311 |
| 1810742 | UGACA | | | AAAGACAUU | | |
| AD- | CUGACCCUUUAGAAUC | 136 | 4306-4326 | UGGAUGAUUCUAAA | 271 | 4304-4326 |
| 1810757 | AUCCA | | | GGGUCAGGA | | |
| AD- | GCAAUCAUGGAAGUU | 137 | 4336-4356 | UAAGGCAACUUCCA | 272 | 4334-4356 |
| 1810767 | GCCUUA | | | UGAUUGCGU | | |
| AD- | UUAUUGUCACUGGUU | 138 | 4354-4374 | UUUCUUAACCAGUG | 273 | 4352-4374 |
| 1810785 | AAGAAA | | | ACAAUAAGG | | |
| AD- | AAGAACUUGGCGAGA | 139 | 4369-4389 | UUUCAAUCUCGCCAA | 274 | 4367-4389 |
| 1810800 | UUGAAA | | | GUUCUUAA | | |
| AD- | AAGGGCUUUUGUUAU | 140 | 4387-4407 | UCAACAAUAACAAA | 275 | 4385-4407 |
| 1810818 | UGUUGA | | | AGCCCUUCA | | |
| AD- | UUGUUGGAUAUUUUU | 141 | 4404-4424 | UGAAACAAAAAUAU | 276 | 4402-4424 |
| 1810822 | GUUUCA | | | CCAACAACA | | |
| AD- | UUCCCAUAAAAGCACA | 142 | 4421-4441 | UAUGAUGUGCUUUU | 277 | 4419-4441 |
| 1810839 | UCAUA | | | AUGGGAAAC | | |

TABLE 4
Modified Sense and Antisense Strand Sequences of Human ABLIM3 dsRNA Agents

| | | SEQ | | SEQ | mRNA Target | SEQ |
|---|---|---|---|---|---|---|
| Duplex | Sense Sequence | ID | Antisense Sequence | ID | Sequence | ID |
| ID | 5′ to 3′ | NO: | 5′ to 3′ | NO: | 5′ to 3′ | NO: |
| AD-1807455 | cscsggg(Ahd)UfuCf | 278 | VPusUfsccuCfaGfAfu | 413 | GCCCGGGAUUCCA | 548 |
| | CfAfaucugaggsasa | | uggAfaUfcccggsgsc | | AUCUGAGGAG | |
| AD-1807481 | csusccu(Uhd)CfuCfC | 279 | VPusGfsugaGfaGfCfaa | 414 | GCCUCCUUCUCCU | 549 |
| | fUfugcucucascsa | | ggAfgAfaggagsgsc | | UGCUCUCACC | |
| AD-1807539 | csasccu(Ghd)AfgGf | 280 | VPusCfsagcUfcUfGfua | 415 | AGCACCUGAGGAU | 550 |
| | AfUfacagagcusgsa | | ucCfuCfaggugscsu | | ACAGAGCUGG | |
| AD-1807561 | csasggu(Ghd)AfuGf | 281 | VPusCfsgaaCfcUfCfac | 416 | CCCAGGUGAUGAG | 551 |
| | AfGfugagguucsgsa | | ucAfuCfaccugsgsg | | UGAGGUUCGA | |
| AD-1807578 | uscsgaa(Ghd)AfaCfG | 282 | VPusUfsuaaAfuCfUfu | 417 | GUUCGAAGAACGG | 552 |
| | fGfaagauuuasasa | | ccgUfuCfuucgasasc | | AAGAUUUAAA | |
| AD-1807591 | cscsucc(Ghd)UfaUfU | 283 | VPusUfscuuUfcAfUfu | 418 | GGCCUCCGUAUUG | 553 |
| | fGfaaugaaagsasa | | caaUfaCfggaggscsc | | AAUGAAAGAC | |
| AD-1807616 | usgscaa(Ahd)GfaCfA | 284 | VPusUfsucaUfgGfUfg | 419 | AGUGCAAAGACAU | 554 |
| | fUfcaccaugasasa | | augUfcUfuugcascsu | | CACCAUGAAC | |
| AD-1807631 | asusgaa(Chd)AfcUfA | 285 | VPusUfsaagGfaAfUfg | 420 | CCAUGAACACUAG | 555 |
| | fGfcauuccuusasa | | cuaGfuGfuucausgsg | | CAUUCCUUAU | |
| AD-1807646 | cscsuua(Uhd)CfaGfC | 286 | VPusUfsaagGfaUfUfc | 421 | UUCCUUAUCAGCA | 556 |
| | fAfgaauccuusasa | | ugcUfgAfuaaggsasa | | GAAUCCUUAC | |
| AD-1807659 | asgscuc(Chd)AfaUfG | 287 | VPusCfsacuGfgAfUfg | 422 | GCAGCUCCAAUGU | 557 |
| | fUfcauccagusgsa | | acaUfuGfgagcusgsc | | CAUCCAGUGC | |
| AD-1807707 | csasacc(Ahd)CfuUfC | 288 | VPusAfsucuGfaUfGfu | 423 | AACAACCACUUCC | 558 |
| | fCfacaucagasusa | | ggaAfgUfgguugsusu | | ACAUCAGAUG | |
| AD-1807725 | asusgcu(Uhd)CfaCfC | 289 | VPusAfsuacUfuGfAfc | 424 | AGAUGCUUCACCU | 559 |
| | fUfgucaaguasusa | | aggUfgAfagcauscsu | | GUCAAGUAUG | |
| AD-1807764 | asgsgcu(Uhd)CfuUf | 290 | VPusGfsguuCfuUfGfa | 425 | UCAGGCUUCUUCU | 560 |
| | CfUfucaagaacscsa | | agaAfgAfagccusgsa | | UCAAGAACCA | |
| AD-1807780 | asascca(Ghd)GfaGfU | 291 | VPusGfsugcAfgAfUfg | 426 | AGAACCAGGAGUA | 561 |
| | fAfcaucugcascsa | | uacUfcCfugguuscsu | | CAUCUGCACC | |
| AD-1807804 | gsascua(Chd)CfaGfC | 292 | VPusCfscauAfgAfGfu | 427 | AGGACUACCAGCA | 562 |
| | fAfacucuaugsgsa | | ugcUfgGfuagucscsu | | ACUCUAUGGC | |
| AD-1807844 | gsgsgac(Uhd)UfcAf | 293 | VPusUfsucgCfcUfGfu | 428 | CCGGGACUUCAUC | 563 |
| | UfCfacaggcgasasa | | gauGfaAfgucccsgsg | | ACAGGCGAAG | |
| AD-1807870 | csasagu(Ghd)CfuUfC | 294 | VPusAfsgcuGfcAfCfac | 429 | CCCAAGUGCUUCG | 564 |
| | fGfugugcagcsusa | | gaAfgCfacuugsgsg | | UGUGCAGCUU | |
| AD-1807888 | csusugu(Ghd)CfaGf | 295 | VPusGfsgaaAfgGfCfu | 430 | AGCUUGUGCAGGA | 565 |
| | GfAfagccuuucscsa | | uccUfgCfacaagscsu | | AGCCUUUCCC | |
| AD-1807889 | csasuug(Ghd)AfgAf | 296 | VPusAfsgguCfaCfCfu | 431 | CCCAUUGGAGACA | 566 |
| | CfAfaggugaccsusa | | uguCfuCfcaaugsgsg | | AGGUGACCUU | |
| AD-1807904 | gsasccu(Uhd)CfaGfC | 297 | VPusAfsuucUfuUfAfc | 432 | GUGACCUUCAGCG | 567 |
| | fGfguaaagaasusa | | cgcUfgAfaggucsasc | | GUAAAGAAUG | |
| AD-1807919 | asgsaau(Ghd)UfgUf | 298 | VPusAfscguUfuGfGfc | 433 | AAAGAAUGUGUGU | 568 |
| | GfUfgccaaacgsusa | | acaCfaCfauucususu | | GCCAAACGUG | |
| AD-1807955 | csasgca(Ghd)UfaAfG | 299 | VPusUfscuuGfaUfGfg | 434 | GCCAGCAGUAAGC | 569 |
| | fCfccaucaagsasa | | gcuUfaCfugcugsgsc | | CCAUCAAGAU | |
| AD-1808063 | csusgcu(Uhd)CfaAf | 300 | VPusAfsgguCfuGfGfc | 435 | AGCUGCUUCAAGU | 570 |
| | GfUfgccagaccsusa | | acuUfgAfagcagscsu | | GCCAGACCUG | |
| AD-1808098 | gsasugg(Uhd)GfuUf | 301 | VPusUfscacAfgUfAfu | 436 | AGGAUGGUGUUCC | 571 |
| | CfCfauacugugsasa | | ggaAfcAfccaucscsu | | AUACUGUGAG | |
| AD-1808139 | usgsgca(Uhd)UfaAf | 302 | VPusAfsaguCfuCfAfca | 437 | UUUGGCAUUAAAU | 572 |
| | AfUfgugagacususa | | uuUfaAfugccasasa | | GUGAGACUUG | |
| AD-1808157 | ususgug(Ahd)CfcGf | 303 | VPusCfsacuGfaUfGfua | 438 | ACUUGUGACCGAU | 573 |
| | AfUfacaucagusgsa | | ucGfgUfcacaasgsu | | ACAUCAGUGG | |
| AD-1808238 | cscsacc(Ahd)GfaUfG | 304 | VPusCfsuucGfgUfGfa | 439 | UGCCACCAGAUGU | 574 |
| | fUfucaccgaasgsa | | acaUfcUfgguggscsa | | UCACCGAAGG | |
| AD-1808258 | gsasgag(Ghd)AfaAf | 305 | VPusUfsgugAfgGfUfa | 440 | AGGAGAGGAAAUG | 575 |
| | UfGfuaccucacsasa | | cauUfuCfcucucscsu | | UACCUCACAG | |
| AD-1808273 | uscsaca(Ghd)GfuUfC | 306 | VPusCfscaaAfcCfUfcg | 441 | CCUCACAGGUUCC | $76 |
| | fCfgagguuugsgsa | | gaAfcCfugugasgsg | | GAGGUUUGGC | |
| AD-1808312 | usasaag(Chd)AfuAf | 307 | VPusAfsgauGfuCfCfg | 442 | GUUAAAGCAUAGA | 577 |
| | GfAfcggacaucsusa | | ucuAfuGfcuuuasasc | | CGGACAUCUG | |
| AD-1808327 | csasucu(Ghd)AfaAfC | 308 | VPusUfsgagAfuGfGfa | 443 | GACAUCUGAAACC | 578 |
| | fCfuccaucucsasa | | gguUfuCfagaugsusc | | UCCAUCUCAC | |
| AD-1808356 | csgsagu(Chd)AfuCf | 309 | VPusAfscuuUfaGfCfg | 444 | ACCGAGUCAUCUG | 579 |
| | UfGfcgcuaaagsusa | | cagAfuGfacucgsgsu | | CGCUAAAGUG | |
| AD-1808383 | gsasgau(Chd)CfuUf | 310 | VPusUfscuuUfgUfAfa | 445 | AUGAGAUCCUUAA | 580 |
| | AfAfuuacaaagsasa | | uuaAfgGfaucucsasu | | UUACAAAGAC | |
| AD-1808407 | gsuscua(Uhd)CfuAf | 311 | VPusGfsuugUfaCfCfu | 446 | AAGUCUAUCUACG | 581 |
| | CfGfagguacaascsa | | cguAfgAfuagacsusu | | AGGUACAACG | |
| AD-1808418 | asusuuc(Chd)UfaUf | 312 | VPusGfsaauGfaGfGfc | 447 | UCAUUUCCUAUGA | 582 |
| | GfAfgccucauuscsa | | ucaUfaGfgaaausgsa | | GCCUCAUUCC | |
| AD-1808433 | csasuuc(Chd)AfgAf | 313 | VPusUfscggAfcAfUfg | 448 | CUCAUUCCAGAUA | 583 |
| | UfAfcauguccgsasa | | uauCfuGfgaaugsasg | | CAUGUCCGAC | |
| AD-1808448 | uscscga(Chd)GfaGfA | 314 | VPusCfsucuCfcAfGfca | 449 | UGUCCGACGAGAU | 584 |
| | fUfgcuggagasgsa | | ucUfcGfucggascsa | | GCUGGAGAGA | |
| AD-1808482 | asgsucg(Chd)UfgGf | 315 | VPusAfsgauAfaUfGfu | 450 | AGAGUCGCUGGGA | 585 |
| | GfAfacauuaucsusa | | uccCfaGfcgacuscsu | | ACAUUAUCUC | |
| AD-1808511 | csasgga(Chd)AfuCfU | 316 | VPusAfsgguUfcUfCfg | 451 | CCCAGGACAUCUA | 586 |
| | fAfcgagaaccsusa | | uagAfuGfuccugsgsg | | CGAGAACCUG | |
| AD-1808561 | uscsacc(Ahd)CfuAfC | 317 | VPusCfsagaGfcGfGfua | 452 | CCUCACCACUACU | 587 |
| | fUfaccgcucusgsa | | guAfgUfggugasgsg | | ACCGCUCUGG | |
| AD-1808598 | csasuac(Chd)AfuAfG | 318 | VPusAfsucuAfaCfUfg | 453 | UCCAUACCAUAGC | 588 |
| | fCfcaguuagasusa | | gcuAfuGfguaugsgsa | | CAGUUAGAUG | |
| AD-1808628 | cscsacu(Chd)CfaAfC | 319 | VPusCfsuggUfaAfGfa | 454 | CUCCACUCCAACC | 589 |
| | fCfucuuaccasgsa | | gguUfgGfaguggsasg | | UCUUACCAGG | |
| AD-1808649 | csusccc(Ahd)AfgCfA | 320 | VPusGfsaugUfgAfAfa | 455 | GGCUCCCAAGCAC | 590 |
| | fCfuuucacauscsa | | gugCfuUfgggagscsc | | UUUCACAUCC | |
| AD-1808678 | gsascag(Uhd)AfaCfA | 321 | VPusUfsuccGfgUfAfg | 456 | GAGACAGUAACAU | 591 |
| | fUfcuaccggasasa | | augUfuAfcugucsusc | | CUACCGGAAA | |
| AD-1808698 | usgsgug(Ahd)UfuUf | 322 | VPusUfsugcUfgUfAfg | 457 | CAUGGUGAUUUGU | 592 |
| | GfUfcuacagcasasa | | acaAfaUfcaccasusg | | CUACAGCAAC | |
| AD-1808727 | ascsaag(Uhd)GfaAfG | 323 | VPusUfsggcUfgAfUfg | 458 | AAACAAGUGAAGA | 593 |
| | fAfcaucagccsasa | | ucuUfcAfcuugususu | | CAUCAGCCAG | |
| AD-1808748 | ascscuc(Chd)AfaGfU | 324 | VPusAfsuggGfaCfUfg | 459 | AGACCUCCAAGUA | 594 |
| | fAfcagucccasusa | | uacUfuGfgagguscsu | | CAGUCCCAUC | |
| AD-1808773 | uscsgga(Ghd)UfcUf | 325 | VPusGfsuccAfgUfAfc | 460 | CUUCGGAGUCUGA | 595 |
| | GfAfguacuggascsa | | ucaGfaCfuccgasasg | | GUACUGGACC | |
| AD-1808789 | asgscca(Ghd)AfaGfG | 326 | VPusCfsagaCfgAfGfaa | 461 | CGAGCCAGAAGGU | 596 |
| | fUfucucgucusgsa | | ccUfuCfuggcuscsg | | UCUCGUCUGG | |
| AD-1808814 | gsasgga(Ghd)GfaUf | 327 | VPusCfsgguCfaAfAfa | 462 | GAGAGGAGGAUGA | 597 |
| | GfAfuuuugaccsgsa | | ucaUfcCfuccucsusc | | UUUUGACCGC | |
| AD-1808842 | ascsaag(Chd)UfcCfA | 328 | VPusAfsauuCfcAfCfu | 463 | GCACAAGCUCCAA | 598 |
| | fAfaguggaaususa | | uugGfaGfcuugusgsc | | AGUGGAAUUG | |
| AD-1808865 | csgsgcu(Ghd)AfuUf | 329 | VPusUfscuuCfcUfUfca | 464 | GCCGGCUGAUUCU | 599 |
| | CfUfgaaggaagsasa | | gaAfuCfagccgsgsc | | GAAGGAAGAA | |
| AD-1808901 | asgscuc(Chd)UfaUfG | 330 | VPusCfsaggGfaUfCfu | 465 | CGAGCUCCUAUGC | 600 |
| | fCfagaucccusgsa | | gcaUfaGfgagcuscsg | | AGAUCCCUGG | |
| AD-1808941 | usgsgcu(Ahd)UfgAf | 331 | VPusUfsgagGfgAfCfa | 466 | GCUGGCUAUGAGA | 601 |
| | GfAfugucccucsasa | | ucuCfaUfagccasgsc | | UGUCCCUCAA | |
| AD-1808978 | uscscuc(Uhd)CfaUfC | 332 | VPusCfsagaUfuUfGfg | 467 | GAUCCUCUCAUCU | 602 |
| | fUfccaaaucusgsa | | agaUfgAfgaggasusc | | CCAAAUCUGC | |
| AD-1809009 | gscscua(Chd)CfgAfA | 333 | VPusAfsgccCfaUfUfuc | 468 | CUGCCUACCGAAG | 603 |
| | fGfaaaugggcsusa | | uuCfgGfuaggcsasg | | AAAUGGGCUG | |
| AD-1809051 | csuscuu(Chd)CfaCfU | 334 | VPusAfsugcUfgUfCfg | 469 | ACCUCUUCCACUA | 604 |
| | fAfcgacagcasusa | | uagUfgGfaagagsgsu | | CGACAGCAUG | |
| AD-1809066 | asgscau(Ghd)AfaCfG | 335 | VPusCfsaguUfgAfCfu | 470 | ACAGCAUGAACGC | 605 |
| | fCfagucaacusgsa | | gogUfuCfaugcusgsu | | AGUCAACUGG | |
| AD-1809080 | ascsaag(Ahd)UfcUfA | 336 | VPusUfsucaUfaAfGfg | 471 | GUACAAGAUCUAC | 606 |
| | fCfccuuaugasasa | | guaGfaUfcuugusasc | | CCUUAUGAAC | |
| AD-1809107 | usgsgug(Ahd)CfuAf | 337 | VPusUfscuuCfcUfCfu | 472 | GCUGGUGACUACA | 607 |
| | CfAfagaggaagsasa | | uguAfgUfcaccasgsc | | AGAGGAAGAA | |
| AD-1809135 | gscscca(Ahd)GfgAf | 338 | VPusUfsccuGfuCfUfac | 473 | CUGCCCAAGGAUG | 608 |
| | UfGfuagacaggsasa | | auCfcUfugggcsasg | | UAGACAGGAC | |
| AD-1809187 | ususcua(Chd)CfaAfG | 339 | VPusAfsugcCfaAfAfg | 474 | AGUUCUACCAAGU | 609 |
| | fUfcuuuggcasusa | | acuUfgGfuagaascsu | | CUUUGGCAUG | |
| AD-1809205 | asusgac(Chd)AfuCfU | 340 | VPusUfscaaAfcUfCfag | 475 | GCAUGACCAUCUC | 610 |
| | fCfugaguuugsasa | | agAfuGfgucausgsc | | UGAGUUUGAC | |
| AD-1809246 | asasuga(Ahd)CfuGf | 341 | VPusGfscuuGfcUfUfc | 476 | GGAAUGAACUGAA | 611 |
| | AfAfgaagcaagscsa | | uucAfgUfucauuscsc | | GAAGCAAGCC | |
| AD-1809283 | asgsgcu(Chd)UfaUf | 342 | VPusCfsauaUfaUfAfu | 477 | AGAGGCUCUAUAA | 612 |
| | AfAfauauauausgsa | | uuaUfaGfagccuscsu | | AUAUAUAUGC | |
| AD-1809293 | asusgua(Ahd)AfaUf | 343 | VPusUfscagUfaGfAfg | 478 | AUAUGUAAAAUCU | 613 |
| | CfUfcucuacugsasa | | agaUfuUfuacausasu | | CUCUACUGAA | |
| AD-1809317 | csgsgua(Uhd)AfaUf | 344 | VPusCfsacaAfgAfGfag | 479 | CUCGGUAUAAUCC | 614 |
| | CfCfucucuugusgsa | | gaUfuAfuaccgsasg | | UCUCUUGUGU | |
| AD-1809354 | usgscca(Uhd)GfaGf | 345 | VPusGfsaaaAfgCfAfag | 480 | CCUGCCAUGAGAC | 615 |
| | AfCfuugcuuuuscsa | | ucUfcAfuggcasgsg | | UUGCUUUUCU | |
| AD-1809369 | ususuuc(Uhd)GfuAf | 346 | VPusUfsugcCfuGfAfc | 481 | GCUUUUCUGUACU | 616 |
| | CfUfgucaggcasasa | | aguAfcAfgaaaasgsc | | GUCAGGCAAG | |
| AD-1809395 | gsuscau(Chd)GfaGf | 347 | VPusCfsauaAfaAfAfua | 482 | ACGUCAUCGAGAU | 617 |
| | AfUfauuuuuausgsa | | ucUfcGfaugacsgsu | | AUUUUUAUGC | |
| AD-1809414 | ususacu(Uhd)UfcUf | 348 | VPusAfscuuAfgAfAfa | 483 | CCUUACUUUCUCU | 618 |
| | CfUfuuucuaagsusa | | agaGfaAfaguaasgsg | | UUUCUAAGUG | |
| AD-1809456 | csusgaa(Ahd)CfaUfC | 349 | VPusAfsguuAfgGfAfc | 484 | UACUGAAACAUCU | 619 |
| | fUfguccuaacsusa | | agaUfgUfuucagsusa | | GUCCUAACUU | |
| AD-1809472 | csasacu(Chd)UfcUfU | 350 | VPusUfsucuUfuAfGfg | 485 | UCCAACUCUCUUU | 620 |
| | fUfccuaaagasasa | | aaaGfaGfaguugsgsa | | CCUAAAGAAG | |
| AD-1809498 | usgsaag(Ahd)AfgUf | 351 | VPusAfsgagAfaGfAfg | 486 | CCUGAAGAAGUCU | 621 |
| | CfUfcucuucucsusa | | agaCfuUfcuucasgsg | | CUCUUCUCUC | |
| AD-1809511 | ususucu(Uhd)AfaAf | 352 | VPusAfsgccCfuAfGfaa | 487 | CCUUUCUUAAAUU | 622 |
| | UfUfucuagggcsusa | | auUfuAfagaaasgsg | | UCUAGGGCUG | |
| AD-1809535 | csusgac(Chd)AfuGf | 353 | VPusUfsgugGfaAfAfc | 488 | UGCUGACCAUGUG | 623 |
| | UfGfguuuccacsasa | | cacAfuGfgucagscsa | | GUUUCCACAC | |
| AD-1809550 | csusccc(Ahd)UfgGf | 354 | VPusUfsgcaGfaUfCfu | 489 | CCCUCCCAUGGGA | 624 |
| | GfAfagaucugcsasa | | uccCfaUfgggagsgsg | | AGAUCUGCAG | |
| AD-1809561 | asasauc(Ahd)GfuGf | 355 | VPusUfscaaAfgGfUfg | 490 | CCAAAUCAGUGAG | $25 |
| | AfGfcaccuuugsasa | | cucAfcUfgauuusgsg | | CACCUUUGAG | |
| AD-1809585 | cscsacg(Ahd)AfgAf | 356 | VPusGfsuugAfgAfAfa | 491 | GCCCACGAAGAAC | 626 |
| | AfCfuuucucaascsa | | guuCfuUfcguggsgsc | | UUUCUCAACA | |
| AD-1809596 | gscsaau(Ghd)CfaGfU | 357 | VPusCfsaccCfuUfUfua | 492 | GGGCAAUGCAGUU | 627 |
| | fUfaaaagggusgsa | | acUfgCfauugcscsc | | AAAAGGGUGA | |
| AD-1809617 | gscscuc(Ahd)AfaUfC | 358 | VPusGfsuaaUfgAfCfu | 493 | GAGCCUCAAAUCU | 628 |
| | fUfagucauuascsa | | agaUfuUfgaggcsusc | | AGUCAUUACA | |
| AD-1809633 | ususaca(Chd)CfaGfU | 359 | VPusAfscuuCfuGfUfu | 494 | CAUUACACCAGUC | 629 |
| | fCfaacagaagsusa | | gacUfgGfuguaasusg | | AACAGAAGUG | |
| AD-1809670 | csusccu(Chd)AfgCfU | 360 | VPusAfsgggUfuAfAfg | 495 | CUCUCCUCAGCUC | 630 |
| | fCfcuuaacccsusa | | gagCfuGfaggagsasg | | CUUAACCCUC | |
| AD-1809702 | usgsgau(Uhd)GfuAf | 361 | VPusAfsaggGfaGfAfg | 496 | CCUGGAUUGUAAC | 631 |
| | AfCfcucucccususa | | guuAfcAfauccasgsg | | CUCUCCCUUG | |
| AD-1809719 | csusugu(Chd)CfaAf | 362 | VPusGfsaauCfcUfAfga | 497 | CCCUUGUCCAAAU | 632 |
| | AfUfcuaggauuscsa | | uuUfgGfacaagsgsg | | CUAGGAUUCC | |
| AD-1809737 | uscscug(Ghd)UfaGf | 363 | VPusUfsuuuCfcUfUfu | 498 | AUUCCUGGUAGGA | 633 |
| | GfAfaaaggaaasasa | | uccUfaCfcaggasasu | | AAAGGAAAAG | |
| AD-1809757 | uscsccu(Chd)CfaCfC | 364 | VPusAfsguuGfgAfAfg | 499 | CUUCCCUCCACCA | 634 |
| | fAfcuuccaacsusa | | uggUfgGfagggasasg | | CUUCCAACUG | |
| AD-1809773 | csusgga(Chd)UfuGf | 365 | VPusCfsucuGfgUfUfc | 500 | ACCUGGACUUGGA | 635 |
| | GfAfgaaccagasgsa | | uccAfaGfuccagsgsu | | GAACCAGAGG | |
| AD-1809822 | csasccu(Ghd)UfuAf | 366 | VPusAfsgcuCfuGfAfu | 501 | GGCACCUGUUAGA | 636 |
| | GfAfaucagagcsusa | | ucuAfaCfaggugscsc | | AUCAGAGCUG | |
| AD-1809839 | gscsugc(Ahd)GfgAf | 367 | VPusGfsuccCfaAfGfaa | 502 | GAGCUGCAGGAUU | 637 |
| | UfUfucuugggascsa | | auCfcUfgcagcsusc | | UCUUGGGACC | |
| AD-1809895 | ususccc(Uhd)CfuUf | 368 | VPusCfsuucUfcCfUfu | 503 | CCUUCCCUCUUUC | 638 |
| | UfCfaaggagaasgsa | | gaaAfgAfgggaasgsg | | AAGGAGAAGC | |
| AD-1809919 | usgsauu(Ghd)CfaGf | 369 | VPusAfsagaAfuAfCfaa | 504 | CAUGAUUGCAGCU | 639 |
| | CfUfuguauucususa | | gcUfgCfaaucasusg | | UGUAUUCUUU | |
| AD-1809937 | ususuag(Chd)CfuUf | 370 | VPusUfsagaUfuGfUfa | 505 | UCUUUAGCCUUAU | 640 |
| | AfUfuacaaucusasa | | auaAfgGfcuaaasgsa | | UACAAUCUAU | |
| AD-1809954 | csusaug(Uhd)GfcCf | 371 | VPusUfsugaGfuUfGfu | 506 | AUCUAUGUGCCUG | 641 |
| | UfGfacaacucasasa | | cagGfcAfcauagsasu | | ACAACUCAAC | |
| AD-1810004 | csuscca(Ahd)CfuGfA | 372 | VPusGfsucuGfgUfUfg | 507 | AGCUCCAACUGAA | 642 |
| | fAfcaaccagascsa | | uucAfgUfuggagscsu | | CAACCAGACA | |
| AD-1810023 | csasgac(Ahd)AfcUfC | 373 | VPusAfsggaUfgAfUfg | 508 | GACAGACAACUCU | 643 |
| | fUfcaucauccsusa | | agaGfuUfgucugsusc | | CAUCAUCCUC | |
| AD-1810038 | asusccu(Chd)CfaGfA | 374 | VPusCfsuauUfuUfCfu | 509 | UCAUCCUCCAGAG | 644 |
| | fGfagaaaauasgsa | | cucUfgGfaggausgsa | | AGAAAAUAGG | |
| AD-1810053 | asasuag(Ghd)CfcGfU | 375 | VPusUfscuuUfgAfGfa | 510 | AAAAUAGGCCGUG | 645 |
| | fGfucucaaagsasa | | cacGfgCfcuauususu | | UCUCAAAGAA | |
| AD-1810068 | asasaga(Ahd)AfgGf | 376 | VPusUfsagaCfcAfAfga | 511 | UCAAAGAAAGGUU | 646 |
| | UfUfcuuggucusasa | | acCfuUfucuuusgsa | | CUUGGUCUAU | |
| AD-1810127 | usgscug(Chd)AfaAf | 377 | VPusAfscauGfgCfCfaa | 512 | CCUGCUGCAAAGU | 647 |
| | GfUfuggccaugsusa | | cuUfuGfcagcasgsg | | UGGCCAUGUU | |
| AD-1810143 | asusguu(Uhd)CfaCf | 378 | VPusAfsaagUfuUfCfcc | 513 | CCAUGUUUCACAG | 648 |
| | AfGfggaaacuususa | | ugUfgAfaacausgsg | | GGAAACUUUU | |
| AD-1810174 | csusgcu(Uhd)AfuGf | 379 | VPusUfsuuuGfgAfAfu | 514 | GGCUGCUUAUGAG | 649 |
| | AfGfauuccaaasasa | | cucAfuAfagcagscsc | | AUUCCAAAAU | |
| AD-1810189 | csasaaa(Uhd)GfaAfG | 380 | VPusUfsuggCfcAfAfc | 515 | UCCAAAAUGAAGU | 650 |
| | fUfguuggccasasa | | acuUfcAfuuuugsgsa | | GUUGGCCAAC | |
| AD-1810221 | cscsauc(Chd)UfgGfA | 381 | VPusAfscugGfgAfAfa | 516 | GGCCAUCCUGGAU | 651 |
| | fUfuuucccagsusa | | aucCfaGfgauggscsc | | UUUCCCAGUG | |
| AD-1810239 | gsusggc(Uhd)UfcCf | 382 | VPusCfsgagCfaGfGfaa | 517 | CAGUGGCUUCCCU | 652 |
| | CfUfuccugcucsgsa | | ggGfaAfgccacsusg | | UCCUGCUCGC | |
| AD-1810255 | asasagc(Uhd)UfaAfC | 383 | VPusGfsagaAfgAfGfa | 518 | AGAAAGCUUAACC | 653 |
| | fCfucucuucuscsa | | gguUfaAfgcuuuscsu | | UCUCUUCUCC | |
| AD-1810277 | cscsaaa(Chd)CfuUfU | 384 | VPusAfsuucAfaGfGfu | 519 | CUCCAAACCUUUC | 654 |
| | fCfaccuugaasusa | | gaaAfgGfuuuggsasg | | ACCUUGAAUG | |
| AD-1810292 | usgsaau(Ghd)GfgUf | 385 | VPusCfsaccAfaAfCfau | 520 | CUUGAAUGGGUAA | 655 |
| | AfAfuguuuggusgsa | | uaCfcCfauucasasg | | UGUUUGGUGG | |
| AD-1810296 | usgsuuc(Chd)UfuCf | 386 | VPusGfsgcuUfcUfCfca | 521 | GCUGUUCCUUCUU | 656 |
| | UfUfggagaagcscsa | | agAfaGfgaacasgsc | | GGAGAAGCCU | |
| AD-1810313 | gscscuu(Ghd)AfgUf | 387 | VPusAfsaaaUfgGfUfcc | 522 | AAGCCUUGAGUCG | 657 |
| | CfGfgaccauuususa | | gaCfuCfaaggcsusu | | GACCAUUUUG | |
| AD-1810345 | asasgga(Uhd)GfaAf | 388 | VPusAfsuuuUfcAfCfu | 523 | GGAAGGAUGAAGA | 658 |
| | GfAfagugaaaasusa | | ucuUfcAfuccuuscsc | | AGUGAAAAUG | |
| AD-1810363 | asusgac(Ahd)AfuAf | 389 | VPusUfsugaGfaGfUfc | 524 | AAAUGACAAUAAU | 659 |
| | AfUfgacucucasasa | | auuAfuUfgucaususu | | GACUCUCAAG | |
| AD-1810398 | ascsaug(Ghd)CfaAfA | 390 | VPusCfsaguUfcUfAfca | 525 | UGACAUGGCAAAU | 660 |
| | fUfguagaacusgsa | | uuUfgCfcauguscsa | | GUAGAACUGA | |
| AD-1810415 | csusgac(Uhd)UfaAf | 391 | VPusGfsuuuGfuUfCfa | 526 | AACUGACUUAAAU | 661 |
| | AfUfugaacaaascsa | | auuUfaAfgucagsusu | | UGAACAAACC | |
| AD-1810446 | ascscuc(Uhd)GfaUfG | 392 | VPusAfsgguGfcUfCfa | 527 | GCACCUCUGAUGU | 662 |
| | fUfugagcaccsusa | | acaUfcAfgaggusgsc | | UGAGCACCUG | |
| AD-1810468 | usgsaau(Ahd)CfuGf | 393 | VPusCfsauuCfaGfUfgc | 528 | GCUGAAUACUGAG | 663 |
| | AfGfcacugaausgsa | | ucAfgUfauucasgsc | | CACUGAAUGG | |
| AD-1810494 | csasggg(Ahd)UfaUf | 394 | VPusUfsauuGfgUfAfg | 529 | CUCAGGGAUAUGC | 664 |
| | GfCfcuaccaausasa | | gcaUfaUfcccugsasg | | CUACCAAUAG | |
| AD-1810526 | asgsgca(Uhd)GfuAf | 395 | VPusUfsuauGfuUfUfg | 530 | UAAGGCAUGUACC | 665 |
| | CfCfcaaacauasasa | | gguAfcAfugccususa | | CAAACAUAAC | |
| AD-1810545 | ascsgga(Uhd)GfuAf | 396 | VPusAfscuuUfcUfGfc | 531 | UAACGGAUGUAAG | 666 |
| | AfGfgcagaaagsusa | | cuuAfcAfuccgususa | | GCAGAAAGUG | |
| AD-1810566 | asuscgg(Ahd)GfaAf | 397 | VPusUfsuucUfcAfUfu | 532 | UGAUCGGAGAAGG | 667 |
| | GfGfaaugagaasasa | | ccuUfcUfccgauscsa | | AAUGAGAAAG | |
| AD-1810591 | gsusgau(Ghd)UfuAf | 398 | VPusUfsgacUfuUfUfc | 533 | GCGUGAUGUUAAU | 668 |
| | AfUfgaaaagucsasa | | auuAfaCfaucacsgsc | | GAAAAGUCAU | |
| AD-1810606 | asgsuca(Uhd)AfuGf | 399 | VPusUfsgcuCfuAfGfc | 534 | AAAGUCAUAUGCA | 669 |
| | CfAfgcuagagcsasa | | ugcAfuAfugacususu | | GCUAGAGCAG | |
| AD-1810638 | csusuuc(Uhd)GfgAf | 400 | VPusAfsugcAfaUfCfu | 535 | AGCUUUCUGGAAG | 670 |
| | AfGfagauugcasusa | | cuuCfcAfgaaagscsu | | AGAUUGCAUC | |
| AD-1810666 | asusuca(Ghd)GfaAf | 401 | VPusUfsacaAfaGfAfuc | 536 | AAAUUCAGGAAGG | 671 |
| | GfGfaucuuugusasa | | cuUfcCfugaaususu | | AUCUUUGUAG | |
| AD-1810676 | asgsagg(Ghd)AfaGf | 402 | VPusAfsacaCfaGfCfag | 537 | CCAGAGGGAAGUC | 672 |
| | UfCfugcugugususa | | acUfuCfccucusgsg | | UGCUGUGUUC | |
| AD-1810692 | usgsuuc(Uhd)CfaUf | 403 | VPusUfsgacAfuCfCfua | 538 | UGUGUUCUCAUGU | 673 |
| | GfUfaggaugucsasa | | caUfgAfgaacascsa | | AGGAUGUCAG | |
| AD-1810727 | uscsucu(Uhd)UfuUf | 404 | VPusAfsgacAfuUfGfg | 539 | CUUCUCUUUUUGG | 674 |
| | GfGfccaaugucsusa | | ccaAfaAfagagasasg | | CCAAUGUCUU | |
| AD-1810742 | usgsucu(Uhd)UfuCf | 405 | VPusGfsucaGfgAfAfa | 540 | AAUGUCUUUUCAC | 675 |
| | AfCfuuuccugascsa | | gugAfaAfagacasusu | | UUUCCUGACC | |
| AD-1810757 | csusgac(Chd)CfuUfU | 406 | VPusGfsgauGfaUfUfc | 541 | UCCUGACCCUUUA | 676 |
| | fAfgaaucaucscsa | | uaaAfgGfgucagsgsa | | GAAUCAUCCC | |
| AD-1810767 | gscsaau(Chd)AfuGf | 407 | VPusAfsaggCfaAfCfu | 542 | ACGCAAUCAUGGA | 677 |
| | GfAfaguugccususa | | uccAfuGfauugcsgsu | | AGUUGCCUUA | |
| AD-1810785 | ususauu(Ghd)UfcAf | 408 | VPusUfsucuUfaAfCfca | 543 | CCUUAUUGUCACU | 678 |
| | CfUfgguuaagasasa | | guGfaCfaauaasgsg | | GGUUAAGAAC | |
| AD-1810800 | asasgaa(Chd)UfuGfG | 409 | VPusUfsucaAfuCfUfc | 544 | UUAAGAACUUGGC | 679 |
| | fCfgagauugasasa | | gccAfaGfuucuusasa | | GAGAUUGAAG | |
| AD-1810818 | asasggg(Chd)UfuUf | 410 | VPusCfsaacAfaUfAfac | 545 | UGAAGGGCUUUUG | 680 |
| | UfGfuuauuguusgsa | | aaAfaGfcccuuscsa | | UUAUUGUUGU | |
| AD-1810822 | ususguu(Ghd)GfaUf | 411 | VPusGfsaaaCfaAfAfaa | 546 | UGUUGUUGGAUAU | 681 |
| | AfUfuuuuguuuscsa | | uaUfcCfaacaascsa | | UUUUGUUUCC | |
| AD-1810839 | ususccc(Ahd)UfaAf | 412 | VPusAfsugaUfgUfGfc | 547 | GUUUCCCAUAAAA | 682 |
| | AfAfgcacaucasusa | | uuuUfaUfgggaasasc | | GCACAUCAUU | |

TABLE 5
ABLIM3 Single Dose Screen in Hepa1-6 Cells

| | % ABLIM3 | | | % ABLIM3 | |
|---|---|---|---|---|---|
| | Message | | | Message | |
| | Remaining | | | Remaining | |
| Duplex Name | Mean | SD | Duplex Name | Mean | SD |
| AD-1810839.1 | 49.940 | 1.488 | AD-1809293.1 | 18.881 | 1.411 |
| AD-1810822.1 | 47.037 | 1.563 | AD-1809283.1 | 2.900 | 0.279 |
| AD-1810818.1 | 48.205 | 1.013 | AD-1809246.1 | 8.773 | 0.999 |
| AD-1810800.1 | 51.029 | 3.275 | AD-1809205.1 | 8.458 | 0.483 |
| AD-1810785.1 | 50.509 | 2.233 | AD-1809187.1 | 4.142 | 0.183 |
| AD-1810767.1 | 48.138 | 2.366 | AD-1809135.1 | 18.581 | 0.778 |
| AD-1810757.1 | 62.353 | 1.932 | AD-1809107.1 | 13.513 | 1.581 |
| AD-1810742.1 | 54.296 | 3.748 | AD-1809205.1 | 17.023 | 1.176 |
| AD-1810727.1 | 59.165 | 1.980 | AD-1809187.1 | 11.397 | 0.772 |
| AD-1810692.1 | 55.551 | 1.804 | AD-1809135.1 | 34.202 | 3.523 |
| AD-1810676.1 | 66.324 | 1.823 | AD-1809107.1 | 30.671 | 1.055 |
| AD-1810666.1 | 51.279 | 1.499 | AD-1809080.1 | 94.268 | 2.234 |
| AD-1810638.1 | 50.405 | 1.370 | AD-1809066.1 | 37.454 | 0.708 |
| AD-1810606.1 | 49.318 | 1.427 | AD-1809051.1 | 37.525 | 2.644 |
| AD-1810591.1 | 47.445 | 1.020 | AD-1809009.1 | 50.593 | 2.955 |
| AD-1810566.1 | 46.991 | 1.020 | AD-1808978.1 | 28.150 | 0.731 |
| AD-1810545.1 | 77.584 | 2.483 | AD-1808941.1 | 31.554 | 1.946 |
| AD-1810526.1 | 48.566 | 2.463 | AD-1808901.1 | 38.254 | 0.646 |
| AD-1810494.1 | 52.776 | 2.132 | AD-1808865.1 | 30.500 | 1.028 |
| AD-1810468.1 | 46.448 | 1.662 | AD-1808842.1 | 38.960 | 0.483 |
| AD-1810446.1 | 54.281 | 1.793 | AD-1808814.1 | 22.480 | 1.096 |
| AD-1810415.1 | 44.403 | 2.813 | AD-1808789.1 | 46.633 | 1.426 |
| AD-1810398.1 | 49.302 | 2.611 | AD-1808773.1 | 61.336 | 2.458 |
| AD-1810363.1 | 48.303 | 0.735 | AD-1808748.1 | 32.402 | 1.061 |
| AD-1810345.1 | 56.469 | 6.579 | AD-1808727.1 | 29.449 | 1.943 |
| AD-1810313.1 | 69.402 | 3.692 | AD-1808698.1 | 25.513 | 1.463 |
| AD-1810296.1 | 58.716 | 3.020 | AD-1808678.1 | 41.395 | 0.879 |
| AD-1810292.1 | 52.975 | 4.214 | AD-1808649.1 | 29.492 | 0.446 |
| AD-1810277.1 | 49.085 | 2.042 | AD-1808628.1 | 31.293 | 0.539 |
| AD-1810255.1 | 46.815 | 1.824 | AD-1808598.1 | 28.085 | 0.851 |
| AD-1810239.1 | 63.361 | 1.618 | AD-1808561.1 | 48.147 | 1.805 |
| AD-1810221.1 | 56.534 | 2.689 | AD-1808511.1 | 50.948 | 3.050 |
| AD-1810189.1 | 64.800 | 5.754 | AD-1808482.1 | 59.364 | 1.486 |
| AD-1810174.1 | 44.716 | 1.350 | AD-1808448.1 | 51.937 | 1.799 |
| AD-1810143.1 | 66.647 | 1.603 | AD-1808433.1 | 37.064 | 0.551 |
| AD-1810127.1 | 59.790 | 2.418 | AD-1808418.1 | 24.593 | 0.687 |
| AD-1810068.1 | 59.756 | 0.562 | AD-1808407.1 | 33.131 | 0.798 |
| AD-1810053.1 | 73.408 | 0.901 | AD-1808383.1 | 10.345 | 0.532 |
| AD-1810038.1 | 57.000 | 1.540 | AD-1808356.1 | 29.735 | 1.068 |
| AD-1810023.1 | 59.887 | 3.676 | AD-1808327.1 | 22.413 | 1.016 |
| AD-1810004.1 | 56.400 | 4.003 | AD-1808312.1 | 21.839 | 0.800 |
| AD-1809954.1 | 48.343 | 3.077 | AD-1808273.1 | 44.109 | 1.721 |
| AD-1809937.1 | 38.981 | 1.083 | AD-1808258.1 | 25.762 | 1.062 |
| AD-1809919.1 | 51.413 | 1.534 | AD-1808238.1 | 30.415 | 2.284 |
| AD-1809895.1 | 60.898 | 2.216 | AD-1808157.1 | 50.280 | 1.509 |
| AD-1809839.1 | 56.989 | 2.001 | AD-1808139.1 | 22.362 | 0.865 |
| AD-1809822.1 | 46.487 | 4.020 | AD-1808098.1 | 19.558 | 0.482 |
| AD-1809773.1 | 64.240 | 1.399 | AD-1808063.1 | 40.421 | 1.032 |
| AD-1809757.1 | 54.610 | 1.245 | AD-1807955.1 | 31.513 | 1.425 |
| AD-1809737.1 | 46.954 | 2.502 | AD-1807919.1 | 42.415 | 1.307 |
| AD-1809719.1 | 51.801 | 1.864 | AD-1807904.1 | 31.449 | 0.822 |
| AD-1809702.1 | 60.105 | 2.076 | AD-1807889.1 | 54.480 | 2.939 |
| AD-1809670.1 | 54.809 | 1.835 | AD-1807888.1 | 38.152 | 1.731 |
| AD-1809633.1 | 53.875 | 5.306 | AD-1807870.1 | 65.949 | 3.009 |
| AD-1809617.1 | 46.580 | 3.490 | AD-1807844.1 | 68.255 | 2.054 |
| AD-1809596.1 | 49.445 | 1.087 | AD-1807804.1 | 29.939 | 1.630 |
| AD-1809585.1 | 44.319 | 2.153 | AD-1807780.1 | 23.409 | 0.426 |
| AD-1809561.1 | 68.525 | 1.535 | AD-1807764.1 | 21.667 | 1.047 |
| AD-1809550.1 | 62.777 | 3.584 | AD-1807725.1 | 18.939 | 0.695 |
| AD-1809535.1 | 58.258 | 2.222 | AD-1807707.1 | 32.573 | 1.716 |
| AD-1809511.1 | 57.067 | 2.201 | AD-1807659.1 | 40.382 | 1.804 |
| AD-1809498.1 | 83.585 | 2.024 | AD-1807646.1 | 9.393 | 0.687 |
| AD-1809472.1 | 59.655 | 2.843 | AD-1807631.1 | 8.050 | 0.376 |
| AD-1809456.1 | 48.165 | 0.977 | AD-1807616.1 | 12.937 | 0.426 |
| AD-1809414.1 | 43.623 | 3.988 | AD-1807591.1 | 13.957 | 0.555 |
| AD-1809395.1 | 40.931 | 1.346 | AD-1807578.1 | 10.386 | 0.234 |
| AD-1809369.1 | 57.180 | 1.004 | AD-1807561.1 | 19.352 | 0.706 |
| AD-1809354.1 | 43.339 | 1.502 | AD-1807539.1 | 24.797 | 1.176 |
| AD-1809317.1 | 43.226 | 0.758 | AD-1807481.1 | 21.057 | 1.421 |
| Positive | 0.805 | 0.152 | AD-1807455.1 | 23.271 | 0.848 |
| Control | | | | | |

TABLE 6
Hotspot Regions in ABLIM3 mRNA

| Duplex IDs That Target | % Message | | | SEQ ID | mRNA Target Sequence |
|---|---|---|---|---|---|
| Hotspot Region | Remaining | Start | End | NO: | (NM_001301015.3) |
| AD-1809702, AD-1809719 | <50 | 3042 | 3081 | 683 | CCTGGATTGTAACCTCTCCCT |
| | | | | | TGTCCAAATCTAGGATTCC |
| AD-1810038, AD-1810053 | <50 | 3420 | 3457 | 684 | TCATCCTCCAGAGAGAAAATA |
| | | | | | GGCCGTGTCTCAAAGAA |
| AD-1810676, AD-1810692 | <50 | 4223 | 4261 | 685 | CCAGAGGGAAGTCTGCTGTGT |
| | | | | | TCTCATGTAGGATGTCAG |
| AD-1807904, AD-1807919 | <45 | 726 | 763 | 686 | GTGACCTTCAGCGGTAAAGAA |
| | | | | | TGTGTGTGCCAAACGTG |
| AD-1808238, AD- | <45 | 1080 | 1137 | 687 | TGCCACCAGATGTTCACCGAA |
| 1808258, AD-1808273 | | | | | GGAGAGGAAATGTACCTCAC |
| | | | | | AGGTTCCGAGGTTTGGC |
| AD-1808418, AD-1808433 | <40 | 1342 | 1379 | 688 | TCATTTCCTATGAGCCTCATTC |
| | | | | | CAGATACATGTCCGAC |
| AD-1808842, AD-1808865 | <40 | 1910 | 1955 | 689 | GCACAAGCTCCAAAGTGGAA |
| | | | | | TTGGCCGGCTGATTCTGAAGG |
| | | | | | AAGAA |
| AD-1809051, AD-1809066 | <40 | 2167 | 2204 | 690 | ACCTCTTCCACTACGACAGCA |
| | | | | | TGAACGCAGTCAACTGG |
| AD-1807707, AD-1807725 | <35 | 480 | 520 | 691 | AACAACCACTTCCACATCAGA |
| | | | | | TGCTTCACCTGTCAAGTATG |
| AD-1808238, AD-1808258 | <35 | 1080 | 1122 | 692 | TGCCACCAGATGTTCACCGAA |
| | | | | | GGAGAGGAAATGTACCTCAC |
| | | | | | AG |
| AD-1808628, AD-1808649 | <35 | 1622 | 1665 | 693 | CTCCACTCCAACCTCTTACCA |
| | | | | | GGCTCCCAAGCACTTTCACAT |
| | | | | | CC |
| AD-1808727, AD-1808748 | <35 | 1744 | 1787 | 694 | AAACAAGTGAAGACATCAGC |
| | | | | | CAGACCTCCAAGTACAGTCCC |
| | | | | | ATC |
| AD-1809187, AD-1809205 | <35 | 2323 | 2363 | 695 | AGTTCTACCAAGTCTTTGGCA |
| | | | | | TGACCATCTCTGAGTTTGAC |
| AD-1807764, AD-1807780 | <25 | 540 | 578 | 696 | TCAGGCTTCTTCTTCAAGAAC |
| | | | | | CAGGAGTACATCTGCACC |
| AD-1808312, AD-1808327 | <25 | 1175 | 1212 | 697 | GTTAAAGCATAGACGGACATC |
| | | | | | TGAAACCTCCATCTCAC |
| AD-1807561, AD-1807578 | <20 | 274 | 313 | 698 | CCCAGGTGATGAGTGAGGTTC |
| | | | | | GAAGAACGGAAGATTTAAA |
| AD-1807616, AD- | <15 | 349 | 401 | 699 | AGTGCAAAGACATCACCATG |
| 1807631, AD-1807646 | | | | | AACACTAGCATTCCTTATCAG |
| | | | | | CAGAATCCTTAC |
| AD-1809354, AD-1809369 | <10 | 2518 | 2555 | 700 | CCTGCCATGAGACTTGCTTTT |
| | | | | | CTGTACTGTCAGGCAAG |

ABLIM3 SEQUENCES

SEQ ID NO: 1
>NM_001301015.3 Homo sapiens actin binding LIM protein family member 3
(ABLIM3), transcript variant 1, mRNA
ACACCCCCTTTGGGCTCCGGAGCCGCTGGGCAGGAATAGTCCGGGGTGCGCGCGAGCAGGCGCTGCCAACCCCACT
TCTGCCCGGGATTCCAATCTGAGGAGCAGGAGGACCGGGGCGCCGGTGTCCTGCCGCCTCCTTCTCCTTGCTCTCA
CCTGCGCCTATTAGTCCACGCGCCTTCAAGGCCAGGGGCTACAGCCCAGACAGAGAGGGGACAGCAGAGGGAGAGA
GAGCACCTGAGGATACAGAGCTGGCACTGGACTGCCTTTTCACCCCCCAGGTGATGAGTGAGGTTCGAAGAACGGA
AGATTTAAAAAGCAGCCGGGGCCTCCGTATTGAATGAAAGACCCAGTGCAAAGACATCACCATGAACACTAGCATT
CCTTATCAGCAGAATCCTTACAATCCACGGGGCAGCTCCAATGTCATCCAGTGCTACCGCTGTGGAGACACCTGCA
AAGGGGAAGTGGTCCGCGTGCACAACAACCACTTCCACATCAGATGCTTCACCTGTCAAGTATGTGGCTGTGGCCT
GGCCCAGTCAGGCTTCTTCTTCAAGAACCAGGAGTACATCTGCACCCAGGACTACCAGCAACTCTATGGCACCCGC
TGTGACAGCTGCCGGGACTTCATCACAGGCGAAGTCATCTCGGCCCTGGGCCGCACTTACCACCCCAAGTGCTTCG
TGTGCAGCTTGTGCAGGAAGCCTTTCCCCATTGGAGACAAGGTGACCTTCAGCGGTAAAGAATGTGTGTGCCAAAC
GTGCTCCCAGTCCATGGCCAGCAGTAAGCCCATCAAGATTCGTGGACCAAGCCACTGTGCCGGGTGCAAGGAGGAG
ATCAAGCACGGCCAGTCACTCCTGGCTCTGGACAAGCAGTGGCACGTCAGCTGCTTCAAGTGCCAGACCTGCAGCG
TCATCCTCACCGGGGAGTATATCAGCAAGGATGGTGTTCCATACTGTGAGTCCGACTACCATGCCCAGTTTGGCAT
TAAATGTGAGACTTGTGACCGATACATCAGTGGCAGAGTCTTGGAGGCAGGAGGGAAGCACTACCACCCAACCTGT
GCCAGGTGTGTACGCTGCCACCAGATGTTCACCGAAGGAGAGGAAATGTACCTCACAGGTTCCGAGGTTTGGCACC
CCATCTGCAAACAGGCAGCCCGGGCAGAGAAGAAGTTAAAGCATAGACGGACATCTGAAACCTCCATCTCACCCCC
TGGATCCAGCATTGGGTCACCCAACCGAGTCATCTGCGCTAAAGTGGATAATGAGATCCTTAATTACAAAGACCTG
GCGGCTCTCCCCAAGGTTAAGTCTATCTACGAGGTACAACGCCCCGACCTCATTTCCTATGAGCCTCATTCCAGAT
ACATGTCCGACGAGATGCTGGAGAGATGTGGCTATGGAGAGTCGCTGGGAACATTATCTCCCTACTCCCAGGACAT
CTACGAGAACCTGGACCTCCGGCAGAGACGGGCCTCCAGCCCGGGGTACATAGACTCCCCCACCTACAGCCGGCAG
GGCATGTCCCCCACCTTCTCCCGCTCACCTCACCACTACTACCGCTCTGGGCCCGAGAGTGGCCGGAGCTCTCCAT
ACCATAGCCAGTTAGATGTGAGGTCCTCCACTCCAACCTCTTACCAGGCTCCCAAGCACTTTCACATCCCAGCTGG
AGACAGTAACATCTACCGGAAACCCCCGATCTACAAACGGCATGGTGATTTGTCTACAGCAACCAAGAGCAAAACA
AGTGAAGACATCAGCCAGACCTCCAAGTACAGTCCCATCTACTCGCCAGACCCCTACTATGCTTCGGAGTCTGAGT
ACTGGACCTACCATGGGTCCCCCAAAGTGCCCCGAGCCAGAAGGTTCTCGTCTGGAGGAGAGGAGGATGATTTTGA
CCGCAGCATGCACAAGCTCCAAAGTGGAATTGGCCGGCTGATTCTGAAGGAAGAAATGAAGGCCCGGTCGAGCTCC
TATGCAGATCCCTGGACCCCTCCCCGGAGCTCCACCAGCAGCCGGGAAGCCCTGCACACAGCTGGCTATGAGATGT
CCCTCAATGGCTCCCCTCGGTCGCACTACCTGGCTGACAGTGATCCTCTCATCTCCAAATCTGCCTCCCTGCCTGC
CTACCGAAGAAATGGGCTGCACAGGACACCCAGCGCAGACCTCTTCCACTACGACAGCATGAACGCAGTCAACTGG
GGCATGCGAGAGTACAAGATCTACCCTTATGAACTGCTGCTGGTGACTACAAGAGGAAGAAACCGACTGCCCAAGG
ATGTAGACAGGACCCGTTTAGAGCGCCACCTGTCCCAGGAAGAGTTCTACCAAGTCTTTGGCATGACCATCTCTGA
GTTTGACCGGCTGGCCCTCTGGAAGAGGAATGAACTGAAGAAGCAAGCCCGGCTGTTCTAGGCAGAGGCTCTATAA
ATATATATGCATTTATATAAAGATATATGTAAAATCTCTCTACTGAAGCTCGGTATAATCCTCTCTTGTGTAATGG
GACACACTGCCTGCCATGAGACTTGCTTTTCTGTACTGTCAGGCAAGCCCACGTCATCGAGATATTTTTATGCTCC
TTACTTTCTCTTTTCTAAGTGCTGTGGGATCTGGGAAGGGATTTGAGGGGACTCTGTCCTTTTATTGGGGATCCTT
TTTATACTGAAACATCTGTCCTAACTTGAGTGCCCCAAGGTCCAACTCTCTTTCCTAAAGAAGGTGCCTGAAGAAG
TCTCTCTTCTCTCTGCTTCGTGGCCCCTTTCTTAAATTTCTAGGGCTGATGCTGACCATGTGGTTTCCACACCTTA
TTGGCCCCAGAGGGGCCCTCCCATGGGAAGATCTGCAGCAGTCTCCCCAAATCAGTGAGCACCTTTGAGCGCCCAC
GAAGAACTTTCTCAACACCCCCAATTAGGAGCTCAGTGCTCTCTTGGGGCAATGCAGTTAAAAGGGTGAGCCTCAA
ATCTAGTCATTACACCAGTCAACAGAAGTGGACAGGGCCTAGGCCTCTCCTCAGCTCCTTAACCCTCCTCCTTCTG
CCCTGGATTGTAACCTCTCCCTTGTCCAAATCTAGGATTCCTGGTAGGAAAAGGAAAAGGCCCTTCCCTTCCCTCC
ACCACTTCCAACTGGCCCCTTTGCCTGACCTGGACTTGGAGAACCAGAGGAAAAGAGAGGGAGCGGAAGTGGGAGA
TGGAGCAGGGCACCTGTTAGAATCAGAGCTGCAGGATTTCTTGGGACCCTCCTCTCTCCCTCACTGCTCCCAGCAC
CTCCTGACCCTTCCCTCTTTCAAGGAGAAGCCCATGATTGCAGCTTGTATTCTTTAGCCTTATTACAATCTATGTG
CCTGACAACTCAACACACCGCAGGGCTAATGTTCCCACCAGAGCTCCAACTGAACAACCAGACAGACAACTCTCAT
CATCCTCCAGAGAGAAAATAGGCCGTGTCTCAAAGAAAGGTTCTTGGTCTATGCCTCTGGTCTGTGGGCTGGCAGG
GCAACCATACCATACCCCCGCCAGTCCTCGGCTCCTGCTGCAAAGTTGGCCATGTTTCACAGGGAAACTTTTGGAA
GAGTGGCTGCTTATGAGATTCCAAAATGAAGTGTTGGCCAACACCGCTCATGGCCATCCTGGATTTTCCCAGTGGC
TTCCCTTCCTGCTCGCCTCCCTGAACAGGGGAGAAAGCTTAACCTCTCTTCTCCTCTCCAAACCTTTCACCTTGAA
TGGGTAATGTTTGGTGGGGGCTGTTCCTTCTTGGAGAAGCCTTGAGTCGGACCATTTTGAGATCATGGAGGAAGGA
TGAAGAAGTGAAAATGACAATAATGACTCTCAAGAGGCTGGCGATGTGACATGGCAAATGTAGAACTGACTTAAAT
TGAACAAACCCTCACTGAGCACCTCTGATGTTGAGCACCTGCTGAATACTGAGCACTGAATGGGGGAGGGGGAGGG
GAGCACGGGGTGAGTCAACCTGGGACTCGGTCTCAGGGATATGCCTACCAATAGCGGGTATCGTAAGGCATGTACC
CAAACATAACGGATGTAAGGCAGAAAGTGATCGGAGAAGGAATGAGAAAGTGTGCGTGATGTTAATGAAAAGTCAT
ATGCAGCTAGAGCAGACCCAGGAAAGCTTTCTGGAAGAGATTGCATCTGAGGAAATTCAGGAAGGATCTTTGTAGA
TTGGGGGGAGATTCTAAATTGAAGGGGTGATGGGGTGAGGGGCCAGAGGGAAGTCTGCTGTGTTCTCATGTAGGAT
GTCAGCCCTCCCTGCAACTTCTCTTTTTGGCCAATGTCTTTTCACTTTCCTGACCCTTTAGAATCATCCCCAGCCA
GACGCAATCATGGAAGTTGCCTTATTGTCACTGGTTAAGAACTTGGCGAGATTGAAGGGCTTTTGTTATTGTTGTT
GGATATTTTTGTTTCCCATAAAAGCACATCATTTCAACCCTAAA
SEQ ID NO: 2
>Reverse Complement of SEQ ID NO: 1
TTTAGGGTTGAAATGATGTGCTTTTATGGGAAACAAAAATATCCAACAACAATAACAAAAGCCCTTCAATCTCGCC
AAGTTCTTAACCAGTGACAATAAGGCAACTTCCATGATTGCGTCTGGCTGGGGATGATTCTAAAGGGTCAGGAAAG
TGAAAAGACATTGGCCAAAAAGAGAAGTTGCAGGGAGGGCTGACATCCTACATGAGAACACAGCAGACTTCCCTCT
GGCCCCTCACCCCATCACCCCTTCAATTTAGAATCTCCCCCCAATCTACAAAGATCCTTCCTGAATTTCCTCAGAT
GCAATCTCTTCCAGAAAGCTTTCCTGGGTCTGCTCTAGCTGCATATGACTTTTCATTAACATCACGCACACTTTCT
CATTCCTTCTCCGATCACTTTCTGCCTTACATCCGTTATGTTTGGGTACATGCCTTACGATACCCGCTATTGGTAG
GCATATCCCTGAGACCGAGTCCCAGGTTGACTCACCCCGTGCTCCCCTCCCCCTCCCCCATTCAGTGCTCAGTATT
CAGCAGGTGCTCAACATCAGAGGTGCTCAGTGAGGGTTTGTTCAATTTAAGTCAGTTCTACATTTGCCATGTCACA
TCGCCAGCCTCTTGAGAGTCATTATTGTCATTTTCACTTCTTCATCCTTCCTCCATGATCTCAAAATGGTCCGACT
CAAGGCTTCTCCAAGAAGGAACAGCCCCCACCAAACATTACCCATTCAAGGTGAAAGGTTTGGAGAGGAGAAGAGA
GGTTAAGCTTTCTCCCCTGTTCAGGGAGGCGAGCAGGAAGGGAAGCCACTGGGAAAATCCAGGATGGCCATGAGCG
GTGTTGGCCAACACTTCATTTTGGAATCTCATAAGCAGCCACTCTTCCAAAAGTTTCCCTGTGAAACATGGCCAAC
TTTGCAGCAGGAGCCGAGGACTGGCGGGGGTATGGTATGGTTGCCCTGCCAGCCCACAGACCAGAGGCATAGACCA
AGAACCTTTCTTTGAGACACGGCCTATTTTCTCTCTGGAGGATGATGAGAGTTGTCTGTCTGGTTGTTCAGTTGGA
GCTCTGGTGGGAACATTAGCCCTGCGGTGTGTTGAGTTGTCAGGCACATAGATTGTAATAAGGCTAAAGAATACAA
GCTGCAATCATGGGCTTCTCCTTGAAAGAGGGAAGGGTCAGGAGGTGCTGGGAGCAGTGAGGGAGAGAGGAGGGTC
CCAAGAAATCCTGCAGCTCTGATTCTAACAGGTGCCCTGCTCCATCTCCCACTTCCGCTCCCTCTCTTTTCCTCTG
GTTCTCCAAGTCCAGGTCAGGCAAAGGGGCCAGTTGGAAGTGGTGGAGGGAAGGGAAGGGCCTTTTCCTTTTCCTA
CCAGGAATCCTAGATTTGGACAAGGGAGAGGTTACAATCCAGGGCAGAAGGAGGAGGGTTAAGGAGCTGAGGAGAG
GCCTAGGCCCTGTCCACTTCTGTTGACTGGTGTAATGACTAGATTTGAGGCTCACCCTTTTAACTGCATTGCCCCA
AGAGAGCACTGAGCTCCTAATTGGGGGTGTTGAGAAAGTTCTTCGTGGGCGCTCAAAGGTGCTCACTGATTTGGGG
AGACTGCTGCAGATCTTCCCATGGGAGGGCCCCTCTGGGGCCAATAAGGTGTGGAAACCACATGGTCAGCATCAGC
CCTAGAAATTTAAGAAAGGGGCCACGAAGCAGAGAGAAGAGAGACTTCTTCAGGCACCTTCTTTAGGAAAGAGAGT
TGGACCTTGGGGCACTCAAGTTAGGACAGATGTTTCAGTATAAAAAGGATCCCCAATAAAAGGACAGAGTCCCCTC
AAATCCCTTCCCAGATCCCACAGCACTTAGAAAAGAGAAAGTAAGGAGCATAAAAATATCTCGATGACGTGGGCTT
GCCTGACAGTACAGAAAAGCAAGTCTCATGGCAGGCAGTGTGTCCCATTACACAAGAGAGGATTATACCGAGCTTC
AGTAGAGAGATTTTACATATATCTTTATATAAATGCATATATATTTATAGAGCCTCTGCCTAGAACAGCCGGGCTT
GCTTCTTCAGTTCATTCCTCTTCCAGAGGGCCAGCCGGTCAAACTCAGAGATGGTCATGCCAAAGACTTGGTAGAA
CTCTTCCTGGGACAGGTGGCGCTCTAAACGGGTCCTGTCTACATCCTTGGGCAGTCGGTTTCTTCCTCTTGTAGTC
ACCAGCAGCAGTTCATAAGGGTAGATCTTGTACTCTCGCATGCCCCAGTTGACTGCGTTCATGCTGTCGTAGTGGA
AGAGGTCTGCGCTGGGTGTCCTGTGCAGCCCATTTCTTCGGTAGGCAGGCAGGGAGGCAGATTTGGAGATGAGAGG
ATCACTGTCAGCCAGGTAGTGCGACCGAGGGGAGCCATTGAGGGACATCTCATAGCCAGCTGTGTGCAGGGCTTCC
CGGCTGCTGGTGGAGCTCCGGGGAGGGGTCCAGGGATCTGCATAGGAGCTCGACCGGGCCTTCATTTCTTCCTTCA
GAATCAGCCGGCCAATTCCACTTTGGAGCTTGTGCATGCTGCGGTCAAAATCATCCTCCTCTCCTCCAGACGAGAA
CCTTCTGGCTCGGGGCACTTTGGGGGACCCATGGTAGGTCCAGTACTCAGACTCCGAAGCATAGTAGGGGTCTGGC
GAGTAGATGGGACTGTACTTGGAGGTCTGGCTGATGTCTTCACTTGTTTTGCTCTTGGTTGCTGTAGACAAATCAC
CATGCCGTTTGTAGATCGGGGGTTTCCGGTAGATGTTACTGTCTCCAGCTGGGATGTGAAAGTGCTTGGGAGCCTG
GTAAGAGGTTGGAGTGGAGGACCTCACATCTAACTGGCTATGGTATGGAGAGCTCCGGCCACTCTCGGGCCCAGAG
CGGTAGTAGTGGTGAGGTGAGCGGGAGAAGGTGGGGGACATGCCCTGCCGGCTGTAGGTGGGGGAGTCTATGTACC
CCGGGCTGGAGGCCCGTCTCTGCCGGAGGTCCAGGTTCTCGTAGATGTCCTGGGAGTAGGGAGATAATGTTCCCAG
CGACTCTCCATAGCCACATCTCTCCAGCATCTCGTCGGACATGTATCTGGAATGAGGCTCATAGGAAATGAGGTCG
GGGCGTTGTACCTCGTAGATAGACTTAACCTTGGGGAGAGCCGCCAGGTCTTTGTAATTAAGGATCTCATTATCCA
CTTTAGCGCAGATGACTCGGTTGGGTGACCCAATGCTGGATCCAGGGGGTGAGATGGAGGTTTCAGATGTCCGTCT
ATGCTTTAACTTCTTCTCTGCCCGGGCTGCCTGTTTGCAGATGGGGTGCCAAACCTCGGAACCTGTGAGGTACATT
TCCTCTCCTTCGGTGAACATCTGGTGGCAGCGTACACACCTGGCACAGGTTGGGTGGTAGTGCTTCCCTCCTGCCT
CCAAGACTCTGCCACTGATGTATCGGTCACAAGTCTCACATTTAATGCCAAACTGGGCATGGTAGTCGGACTCACA
GTATGGAACACCATCCTTGCTGATATACTCCCCGGTGAGGATGACGCTGCAGGTCTGGCACTTGAAGCAGCTGACG
TGCCACTGCTTGTCCAGAGCCAGGAGTGACTGGCCGTGCTTGATCTCCTCCTTGCACCCGGCACAGTGGCTTGGTC
CACGAATCTTGATGGGCTTACTGCTGGCCATGGACTGGGAGCACGTTTGGCACACACATTCTTTACCGCTGAAGGT
CACCTTGTCTCCAATGGGGAAAGGCTTCCTGCACAAGCTGCACACGAAGCACTTGGGGTGGTAAGTGCGGCCCAGG
GCCGAGATGACTTCGCCTGTGATGAAGTCCCGGCAGCTGTCACAGCGGGTGCCATAGAGTTGCTGGTAGTCCTGGG
TGCAGATGTACTCCTGGTTCTTGAAGAAGAAGCCTGACTGGGCCAGGCCACAGCCACATACTTGACAGGTGAAGCA
TCTGATGTGGAAGTGGTTGTTGTGCACGCGGACCACTTCCCCTTTGCAGGTGTCTCCACAGCGGTAGCACTGGATG
ACATTGGAGCTGCCCCGTGGATTGTAAGGATTCTGCTGATAAGGAATGCTAGTGTTCATGGTGATGTCTTTGCACT
GGGTCTTTCATTCAATACGGAGGCCCCGGCTGCTTTTTAAATCTTCCGTTCTTCGAACCTCACTCATCACCTGGGG
GGTGAAAAGGCAGTCCAGTGCCAGCTCTGTATCCTCAGGTGCTCTCTCTCCCTCTGCTGTCCCCTCTCTGTCTGGG
CTGTAGCCCCTGGCCTTGAAGGCGCGTGGACTAATAGGCGCAGGTGAGAGCAAGGAGAAGGAGGCGGCAGGACACC
GGCGCCCCGGTCCTCCTGCTCCTCAGATTGGAATCCCGGGCAGAAGTGGGGTTGGCAGCGCCTGCTCGCGCGCACC
CCGGACTATTCCTGCCCAGCGGCTCCGGAGCCCAAAGGGGGTGT

1.-2. (canceled)

3. A double stranded ribonucleic acid (dsRNA) agent for inhibiting expression of ABLIM3, wherein the dsRNA agent comprises a sense strand and an antisense strand forming a double stranded region,
wherein the antisense strand comprises a region of complementarity to an mRNA encoding Ablim3, and wherein the region of complementarity comprises at least 15 contiguous nucleotides differing by no more than 3 nucleotides from any one of the antisense nucleotide sequences in Tables 3 or 4.

4. The dsRNA agent of claim 3, wherein
(a) the sense strand comprises at least 15 contiguous nucleotides differing by no more than three nucleotides from any one of the nucleotide sequence of nucleotides 82-102, 134-154, 232-252, 276-296, 293-313, 326-346, 351-371, 366-386, 381-401, 414-434, 482-502, 500-520, 542-562, 558-578, 582-602, 622-642, 674-694, 692-712, 713-733, 728-748, 743-763, 779-799, 887-907, 942-962, 983-1003, 1001-1021, 1082-1102, 1102-1122, 1117-1137, 1177-1197, 1192-1212, 1242-1262, 1269-1289, 1313-1333, 1344-1364, 1359-1379, 1374-1394, 1408-1428, 1437-1457, 1550-1570, 1594-1614, 1624-1644, 1645-1665, 1674-1694, 1715-1735, 1746-1766, 1767-1787, 1812-1832, 1859-1879, 1884-1904, 1912-1932, 1935-1955, 1971-1991, 2039-2059, 2096-2116, 2127-2147, 2169-2189, 2184-2204, 2218-2238, 2245-2265, 2273-2293, 2325-2345, 2343-2363, 2385-2405, 2422-2442, 2459-2479, 2483-2503, 2520-2540, 2535-2555, 2561-2581, 2585-2605, 2667-2687, 2703-2723, 2729-2749, 2764-2784, 2788-2808, 2830-2850, 2861-2881, 2885-2905, 2937-2957, 2958-2978, 2974-2994, 3011-3031, 3044-3064, 3061-3081, 3079-3099, 3110-3130, 3146-3166, 3203-3223, 3220-3240, 3279-3299, 3303-3323, 3321-3341, 3338-3358, 3388-3408, 3407-3427, 3422-3442, 3437-3457, 3452-3472, 3532-3552, 3548-3568, 3579-3599, 3594-3614, 3626-3646, 3644-3664, 3682-3702, 3706-3726, 3721-3741, 3746-3766, 3763-3783, 3796-3816, 3814-3834, 3849-3869, 3866-3886, 3897-3917, 3919-3939, 3986-4006, 4018-4038, 4037-4057, 4058-4078, 4084-4104, 4099-4119, 4131-4151, 4159-4179, 4225-4245, 4241-4261, 4276-4296, 4291-4311, 4306-4326, 4336-4356, 4354-4374, 4369-4389, 4387-4407, 4404-4424, or 4421-4441 of SEQ ID NO: 1, and the antisense strand comprises at least 15 contiguous nucleotides from the corresponding nucleotide sequence of SEQ ID NO: 2;
(b) the antisense strand comprises at least 15 contiguous nucleotides differing by no more than three nucleotides from any one of the antisense strand nucleotide sequences of a duplex selected from the group consisting of AD-1807455, AD-1807481, AD-1807539, AD-1807561, AD-1807578, AD-1807591, AD-1807616, AD-1807631, AD-1807646, AD-1807659, AD-1807707, AD-1807725, AD-1807764, AD-1807780, AD-1807804, AD-1807844, AD-1807870, AD-1807888, AD-1807889, AD-1807904, AD-1807919, AD-1807955, AD-1808063, AD-1808098, AD-1808139, AD-1808157, AD-1808238, AD-1808258, AD-1808273, AD-1808312, AD-1808327, AD-1808356, AD-1808383, AD-1808407, AD-1808418, AD-1808433, AD-1808448, AD-1808482, AD-1808511, AD-1808561, AD-1808598, AD-1808628, AD-1808649, AD-1808678, AD-1808698, AD-1808727, AD-1808748, AD-1808773, AD-1808789, AD-1808814, AD-1808842, AD-1808865, AD-1808901, AD-1808941, AD-1808978, AD-1809009, AD-1809051, AD-1809066, AD-1809080, AD-1809107, AD-1809135, AD-1809187, AD-1809205, AD-1809246, AD-1809283, AD-1809293, AD-1809317, AD-1809354, AD-1809369, AD-1809395, AD-1809414, AD-1809456, AD-1809472, AD-1809498, AD-1809511, AD-1809535, AD-1809550, AD-1809561, AD-1809585, AD-1809596, AD-1809617, AD-1809633, AD-1809670, AD-1809702, AD-1809719, AD-1809737, AD-1809757, AD-1809773, AD-1809822, AD-1809839, AD-1809895, AD-1809919, AD-1809937, AD-1809954, AD-1810004, AD-1810023, AD-1810038, AD-1810053, AD-1810068, AD-1810127, AD-1810143, AD-1810174, AD-1810189, AD-1810221, AD-1810239, AD-1810255, AD-1810277, AD-1810292, AD-1810296, AD-1810313, AD-1810345, AD-1810363, AD-1810398, AD-1810415, AD-1810446, AD-1810468, AD-1810494, AD-1810526, AD-1810545, AD-1810566, AD-1810591, AD-1810606, AD-1810638, AD-1810666, AD-1810676, AD-1810692, AD-1810727, AD-1810742, AD-1810757, AD-1810767, AD-1810785, AD-1810800, AD-1810818, AD-1810822, and AD-1810839;
(c) the nucleotide sequence of the sense and antisense strand comprise any one of the sense and antisense strand nucleotide sequences in Tables 3 or 4;
(d) the base pair at the 1 position of the 5′-end of the antisense strand of the duplex is an AU base pair; and/or
(e) the sense strand has a total of 21 nucleotides and the antisense strand has a total of 23 nucleotides.

5.-6. (canceled)

7. The dsRNA agent of claim 3, wherein the sense strand, the antisense strand, or both the sense strand and the antisense strand is conjugated to one or more lipophilic moieties.

8. The dsRNA agent of claim 7, wherein
(a) the one or more lipophilic moieties are conjugated to one or more internal positions in the double stranded region of the dsRNA agent;
(b) the one or more lipophilic moieties are conjugated via a linker or carrier;
(c) lipophilicity of the one or more lipophilic moieties, measured by log Kow, exceeds 0;
(d) hydrophobicity of the double-stranded RNA agent, measured by the unbound fraction in a plasma protein binding assay of the double-stranded RNA agent, exceeds 0.2;
(e) hydrophobicity of the double-stranded RNA agent, measured by the unbound fraction in a plasma protein binding assay of the double-stranded RNA agent, exceeds 0.2, and wherein the plasma protein binding assay is an electrophoretic mobility shift assay using human serum albumin protein; and/or
(f) the one or more lipophilic moieties are conjugated to one or more internal positions on at least one strand.

9.-12. (canceled)

13. The dsRNA agent of claim 3, wherein the dsRNA agent comprises at least one modified nucleotide.

14. The dsRNA agent of claim 13, wherein
(a) no more than five of the sense strand nucleotides and no more than five of the nucleotides of the antisense strand are unmodified nucleotides,
(b) all of the nucleotides of the sense strand and all of the nucleotides of the antisense strand are modified nucleotides;
(c) the at least one modified nucleotide is selected from the group consisting of a deoxy-nucleotide, a 3′-terminal deoxythimidine (dT) nucleotide, a 2′-O-methyl modified nucleotide, a 2′-fluoro modified nucleotide, a 2′-deoxy-modified nucleotide, a locked nucleotide, an unlocked nucleotide, a conformationally restricted nucleotide, a constrained ethyl nucleotide, an abasic nucleotide, a 2′-amino-modified nucleotide, a 2′-O-allyl-modified nucleotide, 2′-C-alkyl-modified nucleotide, 2′-hydroxyl-modified nucleotide, a 2′-methoxyethyl modified nucleotide, a 2′-O-alkyl-modified nucleotide, a morpholino nucleotide, a phosphoramidate, a non-natural nucleotide base, a tetrahydropyran modified nucleotide, a 1,5-anhydrohexitol modified nucleotide, a cyclohexenyl modified nucleotide, a nucleotide comprising a 5′-phosphorothioate group, a nucleotide comprising a 5′-methylphosphonate group, a nucleotide comprising a 5′ phosphate or 5′ phosphate mimic, a nucleotide comprising vinyl phosphonate, a glycol nucleic acid (GNA), an S-glycol nucleic acid (S-GNA), a nucleotide comprising 2-hydroxymethyl-tetrahydrofurane-5-phosphate, a nucleotide comprising 2′-deoxythymidine-3′ phosphate, a nucleotide comprising 2′-deoxyguanosine-3′-phosphate, a nucleotide comprising a 2′ phosphate, and a terminal nucleotide linked to a cholesteryl derivative and a dodecanoic acid bisdecylamide group; and combinations thereof;
(d) the at least one modified nucleotide is selected from the group consisting of a 2′-deoxy-2′-fluoro modified nucleotide, a 2′-deoxy-modified nucleotide, 3′-terminal deoxythimidine nucleotides (dT), a locked nucleotide, an abasic nucleotide, a 2′-amino-modified nucleotide, a 2′-alkyl-modified nucleotide, a morpholino nucleotide, a phosphoramidate, and a non-natural nucleotide base;
(e) the at least one modified nucleotide comprises a short sequence of 3′-terminal deoxythimidine nucleotides (dT); and/or
(f) the at least one modified nucleotide is a 2′-O-methyl, a GNA and/or a 2′ fluoro modification.

15.-19. (canceled)

20. The dsRNA agent of claim 3, wherein
(a) the dsRNA comprises at least one phosphorothioate internucleotide linkage;
(b) the dsRNA agent comprises 6-8 phosphorothioate internucleotide linkages;
(c) each of the sense strand and the antisense strand is no more than 30 nucleotides in length;
(d) at least one of the sense strand or the antisense strand comprises a 3′ overhang of at least 1 nucleotide;
(e) at least one of the sense strand or the antisense strand comprises a 3′ overhang of at least 2 nucleotides;
(f) the double stranded region is 15-30, 17-23, 17-25, 23-37, 19-21, or 21-23 nucleotide pairs in length; and/or
(g) each of the sense strand and antisense strand has 19-30, 19-23, or 21-23 nucleotides.

21.-34. (canceled)

35. The dsRNA agent of claim 8, wherein
(a) the one or more lipophilic moieties are conjugated to the one or more internal positions on the at least one strand via a linker or carrier;
(b) the one or more internal positions include all positions except the terminal two positions from each end of the at least one strand;
(c) the one or more internal positions include all positions except the terminal three positions from each end of the at least one strand;
(d) the one or more internal positions exclude a cleavage site region of the sense strand;
(e) the one or more internal positions include all positions except positions 9-12, counting from the 5′-end of the sense strand;
(f) the one or more internal positions include all positions except positions 11-13, counting from the 3′-end of the sense strand;
(g) the one or more internal positions exclude a cleavage site region of the antisense strand;
(h) the one or more internal positions include all positions except positions 12-14, counting from the 5′-end of the antisense strand;
(i) the one or more internal positions include all positions except positions 11-13 on the sense strand, counting from the 3′-end, and positions 12-14 on the antisense strand, counting from the 5′-end;
(j) the one or more lipophilic moieties are conjugated to one or more of the internal positions selected from the group consisting of positions 4-8 and 13-18 on the sense strand, and positions 6-10 and 15-18 on the antisense strand, counting from the 5′ end of each strand;
(k) the one or more lipophilic moieties are conjugated to one or more of the internal positions selected from the group consisting of positions 5, 6, 7, 15, and 17 on the sense strand, and positions 15 and 17 on the antisense strand, counting from the 5′-end of each strand;
(l) the one or more lipophilic moieties are conjugated to one or more of the internal positions selected from the group consisting of positions 5, 6, 7, 15, and 17 on the sense strand, and positions 15 and 17 on the antisense strand, counting from the 5′-end of each strand; and/or
(m) the one or more internal positions in the double stranded region exclude a cleavage site region of the sense strand.

36.-46. (canceled)

47. The dsRNA agent of claim 7, wherein
(a) the sense strand is 21 nucleotides in length, the antisense strand is 23 nucleotides in length, and the lipophilic moiety is conjugated to position 21, position 20, position 15, position 1, position 7, position 6, or position 2 of the sense strand or position 16 of the antisense strand;
(b) the one or more lipophilic moieties are conjugated to position 21, position 20, position 15, position 1, or position 7 of the sense strand;
(c) the one or more lipophilic moieties are conjugated to position 21, position 20, or position 15 of the sense strand;
(d) the one or more lipophilic moieties are conjugated to position 20 or position 15 of the sense strand; or
(e) the one or more lipophilic moieties are conjugated to position 16 of the antisense strand.

48.-51. (canceled)

52. The dsRNA agent of claim 7, wherein
(a) the one or more lipophilic moieties are an aliphatic, alicyclic, or polyalicyclic compound,
(b) the one or more lipophilic moieties are selected from the group consisting of lipid, cholesterol, retinoic acid, cholic acid, adamantane acetic acid, 1-pyrene butyric acid, dihydrotestosterone, 1,3-bis-O(hexadecyl)glycerol, geranyloxyhexyanol, hexadecylglycerol, borneol, menthol, 1,3-propanediol, heptadecyl group, palmitic acid, myristic acid, 03-(oleoyl) lithocholic acid, 03-(oleoyl)cholenic acid, dimethoxytrityl, and phenoxazine;
(c) the one or more lipophilic moieties contain a saturated or unsaturated C4-C30 hydrocarbon chain, and an optional functional group selected from the group consisting of hydroxyl, amine, carboxylic acid, sulfonate, phosphate, thiol, azide, and alkyne;
(d) the one or more lipophilic moieties contain a saturated or unsaturated C6-C18 hydrocarbon chain;
(e) the one or more lipophilic moieties contain a saturated or unsaturated C16 hydrocarbon chain;
(f) the one or more lipophilic moieties contain a saturated or unsaturated C16 hydrocarbon chain, wherein the saturated or unsaturated C16 hydrocarbon chain is conjugated to position 6, counting from the 5′-end of the strand;
(g) the one or more lipophilic moieties are conjugated via a carrier that replaces one or more nucleotide(s) in the internal position(s) or the double stranded region;
(h) the one or more lipophilic moieties are conjugated via a carrier that replaces one or more nucleotide(s) in the internal position(s) or the double stranded region, wherein the carrier is a cyclic group selected from the group consisting of pyrrolidinyl, pyrazolinyl, pyrazolidinyl, imidazolinyl, imidazolidinyl, piperidinyl, piperazinyl, [1,3] dioxolanyl, oxazolidinyl, isoxazolidinyl, morpholinyl, thiazolidinyl, isothiazolidinyl, quinoxalinyl, pyridazinonyl, tetrahydrofuranyl, and decalinyl; or is an acyclic moiety based on a serinol backbone or a diethanolamine backbone;
(i) the one or more lipophilic moieties are conjugated to the double-stranded iRNA agent via a linker containing an ether, thioether, urea, carbonate, amine, amide, maleimide-thioether, disulfide, phosphodiester, sulfonamide linkage, a product of a click reaction, or carbamate;
(j) the one or more lipophilic moieties are conjugated to a nucleobase, sugar moiety, or internucleosidic linkage;
(k) the one or more lipophilic moieties are conjugated via a bio-cleavable linker selected from the group consisting of DNA, RNA, disulfide, amide, functionalized monosaccharides or oligosaccharides of galactosamine, glucosamine, glucose, galactose, mannose, and combinations thereof; and/or
(l) the 3′ end of the sense strand is protected via an end cap which is a cyclic group having an amine, said cyclic group being selected from the group consisting of pyrrolidinyl, pyrazolinyl, pyrazolidinyl, imidazolinyl, imidazolidinyl, piperidinyl, piperazinyl, [1,3] dioxolanyl, oxazolidinyl, isoxazolidinyl, morpholinyl, thiazolidinyl, isothiazolidinyl, quinoxalinyl, pyridazinonyl, tetrahydrofuranyl, and decalinyl.

53.-63. (canceled)

64. The dsRNA agent of claim 7, wherein the dsRNA agent further comprises
(a) a targeting ligand that targets a neuronal cell;
(b) a targeting ligand that is a GalNAc conjugate;
(c) a terminal, chiral modification occurring at the first internucleotide linkage at the 3′ end of the antisense strand, having the linkage phosphorus atom in Sp configuration,
a terminal, chiral modification occurring at the first internucleotide linkage at the 5′ end of the antisense strand, having the linkage phosphorus atom in Rp configuration, and
a terminal, chiral modification occurring at the first internucleotide linkage at the 5′ end of the sense strand, having the linkage phosphorus atom in either Rp configuration or Sp configuration;
(d) a terminal, chiral modification occurring at the first and second internucleotide linkages at the 3′ end of the antisense strand, having the linkage phosphorus atom in Sp configuration,
a terminal, chiral modification occurring at the first internucleotide linkage at the 5′ end of the antisense strand, having the linkage phosphorus atom in Rp configuration, and
a terminal, chiral modification occurring at the first internucleotide linkage at the 5′ end of the sense strand, having the linkage phosphorus atom in either Rp or Sp configuration;
(e) a terminal, chiral modification occurring at the first, second and third internucleotide linkages at the 3′ end of the antisense strand, having the linkage phosphorus atom in Sp configuration,
a terminal, chiral modification occurring at the first internucleotide linkage at the 5′ end of the antisense strand, having the linkage phosphorus atom in Rp configuration, and
a terminal, chiral modification occurring at the first internucleotide linkage at the 5′ end of the sense strand, having the linkage phosphorus atom in either Rp or Sp configuration;
(f) a terminal, chiral modification occurring at the first, and second internucleotide linkages at the 3′ end of the antisense strand, having the linkage phosphorus atom in Sp configuration,
a terminal, chiral modification occurring at the third internucleotide linkages at the 3′ end of the antisense strand, having the linkage phosphorus atom in Rp configuration,
a terminal, chiral modification occurring at the first internucleotide linkage at the 5′ end of the antisense strand, having the linkage phosphorus atom in Rp configuration, and
a terminal, chiral modification occurring at the first internucleotide linkage at the 5′ end of the sense strand, having the linkage phosphorus atom in either Rp or Sp configuration;
(g) a terminal, chiral modification occurring at the first, and second internucleotide linkages at the 3′ end of the antisense strand, having the linkage phosphorus atom in Sp configuration,
a terminal, chiral modification occurring at the first, and second internucleotide linkages at the 5′ end of the antisense strand, having the linkage phosphorus atom in Rp configuration, and
a terminal, chiral modification occurring at the first internucleotide linkage at the 5′ end of the sense strand, having the linkage phosphorus atom in either Rp or Sp configuration;
(h) a phosphate or phosphate mimic at the 5′-end of the antisense strand; and/or
(i) a phosphate or phosphate mimic at the 5′-end of the antisense strand, wherein the phosphate mimic is a 5′-vinyl phosphonate (VP).

65.-74. (canceled)

75. The dsRNA of claim 3, wherein
(a) the dsRNA agent targets a hotspot region of an mRNA encoding ABLIM3;
(b) the dsRNA agent targets a hotspot region of an mRNA encoding ABLIM3, wherein the hotspot region comprises nucleotides 3042-3081, 3420-3457, 4223-4261, 726-763, 1080-1137, 1342-1379, 1910-1955, 2167-2204, 480-520, 1080-1122, 1622-1665, 1744-1787, 2323-2363, 540-578, 1175-1212, 274-313, 349-401, or 2518-2555 of SEQ ID NO: 1; or
(c) the dsRNA agent targets a hotspot region of an mRNA encoding ABLIM3, wherein the dsRNA agent is selected from the group consisting of AD-1809702, AD-1809719, AD-1810038, AD-1810053, AD-1810676, AD-1810692, AD-1807904, AD-1807919, AD-1808238, AD-1808258, AD-1808273, AD-1808418, AD-1808433, AD-1808842, AD-1808865, AD-1809051, AD-1809066, AD-1807707, AD-1807725, AD-1808628, AD-1808649, AD-1808727, AD-1808748, AD-1809187, AD-1809205, AD-1807764, AD-1807780, AD-1808312, AD-1808327, AD-1807561, AD-1807578, AD-1807616, AD-1807631, AD-1807646, AD-1809354, and AD-1809369.

76.-78. (canceled)

79. A cell containing the dsRNA agent of claim 3.

80. A pharmaceutical composition for inhibiting expression of a gene encoding ABLIM3, comprising
(a) the dsRNA agent of claim 3; or
(b) the dsRNA agent of claim 3 and a lipid formulation.

81. (canceled)

82. The pharmaceutical composition of claim 80, wherein
(a) the dsRNA agent is in an unbuffered solution,
(b) the dsRNA agent is in an unbuffered solution, wherein the unbuffered solution is saline or water;
(c) the dsRNA agent is in a buffer solution;
(d) the dsRNA agent is in a buffer solution, wherein the buffer solution comprises acetate, citrate, prolamine, carbonate, or phosphate or any combination thereof; or
(e) the dsRNA agent is in a buffer solution, wherein the buffer solution is phosphate buffered saline (PBS).

83.-86. (canceled)

87. A method of inhibiting expression of an ABLIM3 gene in a cell, the method comprising introducing into the cell the dsRNA agent of claim 3, thereby inhibiting expression of the ABLIM3 gene in the cell.

88. The method of claim 87, wherein
(a) the cell is within a subject,
(b) the cell is within a human subject;
(c) the cell is within a human subject having an ABLIM3-associated disorder;
(d) the cell is within a human subject having an ABLIM3-associated disorder, wherein the ABLIM3-associated disorder is PTSD, or age-related memory loss;
(e) the dsRNA agent inhibits the expression of ABLIM3 by at least 30%;
(f) introducing the dsRNA agent into the cell inhibits the expression of ABLIM3 by at least 30%; and/or
(g) the cell is within a subject, wherein inhibiting expression of ABLIM3 decreases ABLIM3 protein level in serum of the subject by at least 30%.

89.-94. (canceled)

95. A method of
(a) treating a subject having a disorder that would benefit from reduction in ABLIM3 expression, comprising administering to the subject a therapeutically effective amount of the dsRNA agent of claim 3, thereby treating the subject having the disorder that would benefit from reduction in ABLIM3 expression; and/or
(b) preventing at least one symptom or sign in a subject having a disorder that would benefit from reduction in ABLIM3 expression, comprising administering to the subject a prophylactically effective amount of the dsRNA agent of claim 3, thereby preventing at least one symptom or sign in the subject having the disorder that would benefit from reduction in ABLIM3 expression.

96. (canceled)

97. The method of claim 95, wherein
(a) the disorder is an ABLIM3-associated disorder;
(b) the disorder is an ABLIM3-associated disorder, wherein the ABLIM3-associated disorder is PTSD or age-related memory loss;
(c) the subject is human;
(d) the administration of the agent to the subject causes improved memory, or a decrease in anxiety, depression, fear, agitation, hostility, and/or distress;
(e) the dsRNA agent is administered to the subject at a dose of about 0.01 mg/kg to about 50 mg/kg;
(f) the dsRNA agent is administered to the subject intrathecally;
(g) the method further comprises determining the level of ABLIM3 in a sample(s) from the subject;
(h) the method further comprises determining the level of ABLIM3 in a sample(s) from the subject, wherein the level of ABLIM3 in the subject sample(s) is an ABLIM3 protein level in a blood, serum, or cerebrospinal fluid sample(s); and/or
(i) the method further comprises administering to the subject an additional therapeutic agent.

98.-106. (canceled)

107. A kit, a vial, a syringe, or an intrathecal pump comprising the dsRNA agent of claim 3.

108-110. (canceled)

The application's sequence listing, which the Patent Office published only in electronic form, follows.

SEQUENCE LISTING (700 sequences)

SEQ ID NO: 1 - RNA, 4452 nt, Homo sapiens
  source 1..4452: mol_type = mRNA
acaccccctttgggctccggagccgctgggcaggaatagtccggggtgcgcgcgagcaggcgctgccaaccccacttctgcccgggattccaatctgaggagcaggaggaccggggcgccggtgtcctgccgcctccttctccttgctctcacctgcgcctattagtccacgcgccttcaaggccaggggctacagcccagacagagaggggacagcagagggagagagagcacctgaggatacagagctggcactggactgccttttcaccccccaggtgatgagtgaggttcgaagaacggaagatttaaaaagcagccggggcctccgtattgaatgaaagacccagtgcaaagacatcaccatgaacactagcattccttatcagcagaatccttacaatccacggggcagctccaatgtcatccagtgctaccgctgtggagacacctgcaaaggggaagtggtccgcgtgcacaacaaccacttccacatcagatgcttcacctgtcaagtatgtggctgtggcctggcccagtcaggcttcttcttcaagaaccaggagtacatctgcacccaggactaccagcaactctatggcacccgctgtgacagctgccgggacttcatcacaggcgaagtcatctcggccctgggccgcacttaccaccccaagtgcttcgtgtgcagcttgtgcaggaagcctttccccattggagacaaggtgaccttcagcggtaaagaatgtgtgtgccaaacgtgctcccagtccatggccagcagtaagcccatcaagattcgtggaccaagccactgtgccgggtgcaaggaggagatcaagcacggccagtcactcctggctctggacaagcagtggcacgtcagctgcttcaagtgccagacctgcagcgtcatcctcaccggggagtatatcagcaaggatggtgttccatactgtgagtccgactaccatgcccagtttggcattaaatgtgagacttgtgaccgatacatcagtggcagagtcttggaggcaggagggaagcactaccacccaacctgtgccaggtgtgtacgctgccaccagatgttcaccgaaggagaggaaatgtacctcacaggttccgaggtttggcaccccatctgcaaacaggcagcccgggcagagaagaagttaaagcatagacggacatctgaaacctccatctcaccccctggatccagcattgggtcacccaaccgagtcatctgcgctaaagtggataatgagatccttaattacaaagacctggcggctctccccaaggttaagtctatctacgaggtacaacgccccgacctcatttcctatgagcctcattccagatacatgtccgacgagatgctggagagatgtggctatggagagtcgctgggaacattatctccctactcccaggacatctacgagaacctggacctccggcagagacgggcctccagcccggggtacatagactcccccacctacagccggcagggcatgtcccccaccttctcccgctcacctcaccactactaccgctctgggcccgagagtggccggagctctccataccatagccagttagatgtgaggtcctccactccaacctcttaccaggctcccaagcactttcacatcccagctggagacagtaacatctaccggaaacccccgatctacaaacggcatggtgatttgtctacagcaaccaagagcaaaacaagtgaagacatcagccagacctccaagtacagtcccatctactcgccagacccctactatgcttcggagtctgagtactggacctaccatgggtcccccaaagtgccccgagccagaaggttctcgtctggaggagaggaggatgattttgaccgcagcatgcacaagctccaaagtggaattggccggctgattctgaaggaagaaatgaaggcccggtcgagctcctatgcagatccctggacccctccccggagctccaccagcagccgggaagccctgcacacagctggctatgagatgtccctcaatggctcccctcggtcgcactacctggctgacagtgatcctctcatctccaaatctgcctccctgcctgcctaccgaagaaatgggctgcacaggacacccagcgcagacctcttccactacgacagcatgaacgcagtcaactggggcatgcgagagtacaagatctacccttatgaactgctgctggtgactacaagaggaagaaaccgactgcccaaggatgtagacaggacccgtttagagcgccacctgtcccaggaagagttctaccaagtctttggcatgaccatctctgagtttgaccggctggccctctggaagaggaatgaactgaagaagcaagcccggctgttctaggcagaggctctataaatatatatgcatttatataaagatatatgtaaaatctctctactgaagctcggtataatcctctcttgtgtaatgggacacactgcctgccatgagacttgcttttctgtactgtcaggcaagcccacgtcatcgagatatttttatgctccttactttctcttttctaagtgctgtgggatctgggaagggatttgaggggactctgtccttttattggggatcctttttatactgaaacatctgtcctaacttgagtgccccaaggtccaactctctttcctaaagaaggtgcctgaagaagtctctcttctctctgcttcgtggcccctttcttaaatttctagggctgatgctgaccatgtggtttccacaccttattggccccagaggggccctcccatgggaagatctgcagcagtctccccaaatcagtgagcacctttgagcgcccacgaagaactttctcaacacccccaattaggagctcagtgctctcttggggcaatgcagttaaaagggtgagcctcaaatctagtcattacaccagtcaacagaagtggacagggcctaggcctctcctcagctccttaaccctcctccttctgccctggattgtaacctctcccttgtccaaatctaggattcctggtaggaaaaggaaaaggcccttcccttccctccaccacttccaactggcccctttgcctgacctggacttggagaaccagaggaaaagagagggagcggaagtgggagatggagcagggcacctgttagaatcagagctgcaggatttcttgggaccctcctctctccctcactgctcccagcacctcctgacccttccctctttcaaggagaagcccatgattgcagcttgtattctttagccttattacaatctatgtgcctgacaactcaacacaccgcagggctaatgttcccaccagagctccaactgaacaaccagacagacaactctcatcatcctccagagagaaaataggccgtgtctcaaagaaaggttcttggtctatgcctctggtctgtgggctggcagggcaaccataccatacccccgccagtcctcggctcctgctgcaaagttggccatgtttcacagggaaacttttggaagagtggctgcttatgagattccaaaatgaagtgttggccaacaccgctcatggccatcctggattttcccagtggcttcccttcctgctcgcctccctgaacaggggagaaagcttaacctctcttctcctctccaaacctttcaccttgaatgggtaatgtttggtgggggctgttccttcttggagaagccttgagtcggaccattttgagatcatggaggaaggatgaagaagtgaaaatgacaataatgactctcaagaggctggcgatgtgacatggcaaatgtagaactgacttaaattgaacaaaccctcactgagcacctctgatgttgagcacctgctgaatactgagcactgaatgggggagggggaggggagcacggggtgagtcaacctgggactcggtctcagggatatgcctaccaatagcgggtatcgtaaggcatgtacccaaacataacggatgtaaggcagaaagtgatcggagaaggaatgagaaagtgtgcgtgatgttaatgaaaagtcatatgcagctagagcagacccaggaaagctttctggaagagattgcatctgaggaaattcaggaaggatctttgtagattggggggagattctaaattgaaggggtgatggggtgaggggccagagggaagtctgctgtgttctcatgtaggatgtcagccctccctgcaacttctctttttggccaatgtcttttcactttcctgaccctttagaatcatccccagccagacgcaatcatggaagttgccttattgtcactggttaagaacttggcgagattgaagggcttttgttattgttgttggatatttttgtttcccataaaagcacatcatttcaaccctaaa

SEQ ID NO: 2 - RNA, 4452 nt, Homo sapiens
  source 1..4452: mol_type = mRNA
tttagggttgaaatgatgtgcttttatgggaaacaaaaatatccaacaacaataacaaaagcccttcaatctcgccaagttcttaaccagtgacaataaggcaacttccatgattgcgtctggctggggatgattctaaagggtcaggaaagtgaaaagacattggccaaaaagagaagttgcagggagggctgacatcctacatgagaacacagcagacttccctctggcccctcaccccatcaccccttcaatttagaatctccccccaatctacaaagatccttcctgaatttcctcagatgcaatctcttccagaaagctttcctgggtctgctctagctgcatatgacttttcattaacatcacgcacactttctcattccttctccgatcactttctgccttacatccgttatgtttgggtacatgccttacgatacccgctattggtaggcatatccctgagaccgagtcccaggttgactcaccccgtgctcccctccccctcccccattcagtgctcagtattcagcaggtgctcaacatcagaggtgctcagtgagggtttgttcaatttaagtcagttctacatttgccatgtcacatcgccagcctcttgagagtcattattgtcattttcacttcttcatccttcctccatgatctcaaaatggtccgactcaaggcttctccaagaaggaacagcccccaccaaacattacccattcaaggtgaaaggtttggagaggagaagagaggttaagctttctcccctgttcagggaggcgagcaggaagggaagccactgggaaaatccaggatggccatgagcggtgttggccaacacttcattttggaatctcataagcagccactcttccaaaagtttccctgtgaaacatggccaactttgcagcaggagccgaggactggcgggggtatggtatggttgccctgccagcccacagaccagaggcatagaccaagaacctttctttgagacacggcctattttctctctggaggatgatgagagttgtctgtctggttgttcagttggagctctggtgggaacattagccctgcggtgtgttgagttgtcaggcacatagattgtaataaggctaaagaatacaagctgcaatcatgggcttctccttgaaagagggaagggtcaggaggtgctgggagcagtgagggagagaggagggtcccaagaaatcctgcagctctgattctaacaggtgccctgctccatctcccacttccgctccctctcttttcctctggttctccaagtccaggtcaggcaaaggggccagttggaagtggtggagggaagggaagggccttttccttttcctaccaggaatcctagatttggacaagggagaggttacaatccagggcagaaggaggagggttaaggagctgaggagaggcctaggccctgtccacttctgttgactggtgtaatgactagatttgaggctcacccttttaactgcattgccccaagagagcactgagctcctaattgggggtgttgagaaagttcttcgtgggcgctcaaaggtgctcactgatttggggagactgctgcagatcttcccatgggagggcccctctggggccaataaggtgtggaaaccacatggtcagcatcagccctagaaatttaagaaaggggccacgaagcagagagaagagagacttcttcaggcaccttctttaggaaagagagttggaccttggggcactcaagttaggacagatgtttcagtataaaaaggatccccaataaaaggacagagtcccctcaaatcccttcccagatcccacagcacttagaaaagagaaagtaaggagcataaaaatatctcgatgacgtgggcttgcctgacagtacagaaaagcaagtctcatggcaggcagtgtgtcccattacacaagagaggattataccgagcttcagtagagagattttacatatatctttatataaatgcatatatatttatagagcctctgcctagaacagccgggcttgcttcttcagttcattcctcttccagagggccagccggtcaaactcagagatggtcatgccaaagacttggtagaactcttcctgggacaggtggcgctctaaacgggtcctgtctacatccttgggcagtcggtttcttcctcttgtagtcaccagcagcagttcataagggtagatcttgtactctcgcatgccccagttgactgcgttcatgctgtcgtagtggaagaggtctgcgctgggtgtcctgtgcagcccatttcttcggtaggcaggcagggaggcagatttggagatgagaggatcactgtcagccaggtagtgcgaccgaggggagccattgagggacatctcatagccagctgtgtgcagggcttcccggctgctggtggagctccggggaggggtccagggatctgcataggagctcgaccgggccttcatttcttccttcagaatcagccggccaattccactttggagcttgtgcatgctgcggtcaaaatcatcctcctctcctccagacgagaaccttctggctcggggcactttgggggacccatggtaggtccagtactcagactccgaagcatagtaggggtctggcgagtagatgggactgtacttggaggtctggctgatgtcttcacttgttttgctcttggttgctgtagacaaatcaccatgccgtttgtagatcgggggtttccggtagatgttactgtctccagctgggatgtgaaagtgcttgggagcctggtaagaggttggagtggaggacctcacatctaactggctatggtatggagagctccggccactctcgggcccagagcggtagtagtggtgaggtgagcgggagaaggtgggggacatgccctgccggctgtaggtgggggagtctatgtaccccgggctggaggcccgtctctgccggaggtccaggttctcgtagatgtcctgggagtagggagataatgttcccagcgactctccatagccacatctctccagcatctcgtcggacatgtatctggaatgaggctcataggaaatgaggtcggggcgttgtacctcgtagatagacttaaccttggggagagccgccaggtctttgtaattaaggatctcattatccactttagcgcagatgactcggttgggtgacccaatgctggatccagggggtgagatggaggtttcagatgtccgtctatgctttaacttcttctctgcccgggctgcctgtttgcagatggggtgccaaacctcggaacctgtgaggtacatttcctctccttcggtgaacatctggtggcagcgtacacacctggcacaggttgggtggtagtgcttccctcctgcctccaagactctgccactgatgtatcggtcacaagtctcacatttaatgccaaactgggcatggtagtcggactcacagtatggaacaccatccttgctgatatactccccggtgaggatgacgctgcaggtctggcacttgaagcagctgacgtgccactgcttgtccagagccaggagtgactggccgtgcttgatctcctccttgcacccggcacagtggcttggtccacgaatcttgatgggcttactgctggccatggactgggagcacgtttggcacacacattctttaccgctgaaggtcaccttgtctccaatggggaaaggcttcctgcacaagctgcacacgaagcacttggggtggtaagtgcggcccagggccgagatgacttcgcctgtgatgaagtcccggcagctgtcacagcgggtgccatagagttgctggtagtcctgggtgcagatgtactcctggttcttgaagaagaagcctgactgggccaggccacagccacatacttgacaggtgaagcatctgatgtggaagtggttgttgtgcacgcggaccacttcccctttgcaggtgtctccacagcggtagcactggatgacattggagctgccccgtggattgtaaggattctgctgataaggaatgctagtgttcatggtgatgtctttgcactgggtctttcattcaatacggaggccccggctgctttttaaatcttccgttcttcgaacctcactcatcacctggggggtgaaaaggcagtccagtgccagctctgtatcctcaggtgctctctctccctctgctgtcccctctctgtctgggctgtagcccctggccttgaaggcgcgtggactaataggcgcaggtgagagcaaggagaaggaggcggcaggacaccggcgccccggtcctcctgctcctcagattggaatcccgggcagaagtggggttggcagcgcctgctcgcgcgcaccccggactattcctgcccagcggctccggagcccaaagggggtgt

SEQ ID NO: 3 - protein, 16 aa, synthetic construct
AAVALLPAVLLALLAP

SEQ ID NO: 4 - protein, 11 aa, synthetic construct
AALLPVLLAAP

SEQ ID NO: 5 - protein, 13 aa, synthetic construct
GRKKRRQRRRPPQ

SEQ ID NO: 6 - protein, 16 aa, synthetic construct
RQIKIWFQNRRMKWKK

SEQ ID NO: 7 - skipped

SEQ ID NO: 8 - RNA, 21 nt, synthetic construct
  source 1..21: mol_type = other RNA
ccgggattccaatctgaggaa

SEQ ID NO: 9 - RNA, 21 nt, synthetic construct
  source 1..21: mol_type = other RNA
ctccttctccttgctctcaca

SEQ ID NO: 10 - RNA, 21 nt, synthetic construct
  source 1..21: mol_type = other RNA
cacctgaggatacagagctga

SEQ ID NO: 11 - RNA, 21 nt, synthetic construct
  source 1..21: mol_type = other RNA
caggtgatgagtgaggttcga

SEQ ID NO: 12 - RNA, 21 nt, synthetic construct
  source 1..21: mol_type = other RNA
tcgaagaacggaagatttaaa

SEQ ID NO: 13 - RNA, 21 nt, synthetic construct
  source 1..21: mol_type = other RNA
cctccgtattgaatgaaagaa

SEQ ID NO: 14 - RNA, 21 nt, synthetic construct
  source 1..21: mol_type = other RNA
tgcaaagacatcaccatgaaa

SEQ ID NO: 15 - RNA, 21 nt, synthetic construct
  source 1..21: mol_type = other RNA
atgaacactagcattccttaa

SEQ ID NO: 16 - RNA, 21 nt, synthetic construct
  source 1..21: mol_type = other RNA
ccttatcagcagaatccttaa

SEQ ID NO: 17 - RNA, 21 nt, synthetic construct
  source 1..21: mol_type = other RNA
agctccaatgtcatccagtga

SEQ ID NO: 18 - RNA, 21 nt, synthetic construct
  source 1..21: mol_type = other RNA
caaccacttccacatcagata

SEQ ID NO: 19 - RNA, 21 nt, synthetic construct
  source 1..21: mol_type = other RNA
atgcttcacctgtcaagtata

SEQ ID NO: 20 - RNA, 21 nt, synthetic construct
  source 1..21: mol_type = other RNA
aggcttcttcttcaagaacca

SEQ ID NO: 21 - RNA, 21 nt, synthetic construct
  source 1..21: mol_type = other RNA
aaccaggagtacatctgcaca

SEQ ID NO: 22 - RNA, 21 nt, synthetic construct
  source 1..21: mol_type = other RNA
gactaccagcaactctatgga

SEQ ID NO: 23 - RNA, 21 nt, synthetic construct
  source 1..21: mol_type = other RNA
gggacttcatcacaggcgaaa

SEQ ID NO: 24 - RNA, 21 nt, synthetic construct
  source 1..21: mol_type = other RNA
caagtgcttcgtgtgcagcta

SEQ ID NO: 25 - RNA, 21 nt, synthetic construct
  source 1..21: mol_type = other RNA
cttgtgcaggaagcctttcca

SEQ ID NO: 26 - RNA, 21 nt, synthetic construct
  source 1..21: mol_type = other RNA
cattggagacaaggtgaccta

SEQ ID NO: 27 - RNA, 21 nt, synthetic construct
  source 1..21: mol_type = other RNA
gaccttcagcggtaaagaata

SEQ ID NO: 28 - RNA, 21 nt, synthetic construct
  source 1..21: mol_type = other RNA
agaatgtgtgtgccaaacgta

SEQ ID NO: 29 - RNA, 21 nt, synthetic construct
  source 1..21: mol_type = other RNA
cagcagtaagcccatcaagaa

SEQ ID NO: 30 - RNA, 21 nt, synthetic construct
  source 1..21: mol_type = other RNA
ctgcttcaagtgccagaccta

SEQ ID NO: 31 - RNA, 21 nt, synthetic construct
  source 1..21: mol_type = other RNA
gatggtgttccatactgtgaa

SEQ ID NO: 32 - RNA, 21 nt, synthetic construct
  source 1..21: mol_type = other RNA
tggcattaaatgtgagactta

SEQ ID NO: 33 - RNA, 21 nt, synthetic construct
  source 1..21: mol_type = other RNA
ttgtgaccgatacatcagtga

SEQ ID NO: 34 - RNA, 21 nt, synthetic construct
  source 1..21: mol_type = other RNA
ccaccagatgttcaccgaaga

SEQ ID NO: 35 - RNA, 21 nt, synthetic construct
  source 1..21: mol_type = other RNA
gagaggaaatgtacctcacaa

SEQ ID NO: 36 - RNA, 21 nt, synthetic construct
  source 1..21: mol_type = other RNA
tcacaggttccgaggtttgga

SEQ ID NO: 37 - RNA, 21 nt, synthetic construct
  source 1..21: mol_type = other RNA
taaagcatagacggacatcta

SEQ ID NO: 38 - RNA, 21 nt, synthetic construct
  source 1..21: mol_type = other RNA
catctgaaacctccatctcaa

SEQ ID NO: 39 - RNA, 21 nt, synthetic construct
  source 1..21: mol_type = other RNA
cgagtcatctgcgctaaagta

SEQ ID NO: 40 - RNA, 21 nt, synthetic construct
  source 1..21: mol_type = other RNA
gagatccttaattacaaagaa

SEQ ID NO: 41 - RNA, 21 nt, synthetic construct
  source 1..21: mol_type = other RNA
gtctatctacgaggtacaaca

SEQ ID NO: 42 - RNA, 21 nt, synthetic construct
  source 1..21: mol_type = other RNA
atttcctatgagcctcattca

SEQ ID NO: 43 - RNA, 21 nt, synthetic construct
  source 1..21: mol_type = other RNA
cattccagatacatgtccgaa

SEQ ID NO: 44 - RNA, 21 nt, synthetic construct
  source 1..21: mol_type = other RNA
tccgacgagatgctggagaga

SEQ ID NO: 45 - RNA, 21 nt, synthetic construct
  source 1..21: mol_type = other RNA
agtcgctgggaacattatcta

SEQ ID NO: 46 - RNA, 21 nt, synthetic construct
  source 1..21: mol_type = other RNA
caggacatctacgagaaccta

SEQ ID NO: 47 - RNA, 21 nt, synthetic construct
  source 1..21: mol_type = other RNA
tcaccactactaccgctctga

SEQ ID NO: 48 - RNA, 21 nt, synthetic construct
  source 1..21: mol_type = other RNA
cataccatagccagttagata

SEQ ID NO: 49 - RNA, 21 nt, synthetic construct
  source 1..21: mol_type = other RNA
ccactccaacctcttaccaga

SEQ ID NO: 50 - RNA, 21 nt, synthetic construct
  source 1..21: mol_type = other RNA
ctcccaagcactttcacatca

SEQ ID NO: 51 - RNA, 21 nt, synthetic construct
  source 1..21: mol_type = other RNA
gacagtaacatctaccggaaa

SEQ ID NO: 52 - RNA, 21 nt, synthetic construct
  source 1..21: mol_type = other RNA
tggtgatttgtctacagcaaa

SEQ ID NO: 53 - RNA, 21 nt, synthetic construct
  source 1..21: mol_type = other RNA
acaagtgaagacatcagccaa

SEQ ID NO: 54 - RNA, 21 nt, synthetic construct
  source 1..21: mol_type = other RNA
acctccaagtacagtcccata

SEQ ID NO: 55 - RNA, 21 nt, synthetic construct
  source 1..21: mol_type = other RNA
tcggagtctgagtactggaca

SEQ ID NO: 56 - RNA, 21 nt, synthetic construct
  source 1..21: mol_type = other RNA
agccagaaggttctcgtctga

SEQ ID NO: 57 - RNA, 21 nt, synthetic construct
  source 1..21: mol_type = other RNA
gaggaggatgattttgaccga

SEQ ID NO: 58 - RNA, 21 nt, synthetic construct
  source 1..21: mol_type = other RNA
acaagctccaaagtggaatta

SEQ ID NO: 59 - RNA, 21 nt, synthetic construct
  source 1..21: mol_type = other RNA
cggctgattctgaaggaagaa

SEQ ID NO: 60 - RNA, 21 nt, synthetic construct
  source 1..21: mol_type = other RNA
agctcctatgcagatccctga

SEQ ID NO: 61 - RNA, 21 nt, synthetic construct
  source 1..21: mol_type = other RNA
tggctatgagatgtccctcaa

SEQ ID NO: 62 - RNA, 21 nt, synthetic construct
  source 1..21: mol_type = other RNA
tcctctcatctccaaatctga

SEQ ID NO: 63 - RNA, 21 nt, synthetic construct
  source 1..21: mol_type = other RNA
gcctaccgaagaaatgggcta

SEQ ID NO: 64 - RNA, 21 nt, synthetic construct
  source 1..21: mol_type = other RNA
ctcttccactacgacagcata

SEQ ID NO: 65 - RNA, 21 nt, synthetic construct
  source 1..21: mol_type = other RNA
agcatgaacgcagtcaactga

SEQ ID NO: 66 - RNA, 21 nt, synthetic construct
  source 1..21: mol_type = other RNA
acaagatctacccttatgaaa

SEQ ID NO: 67 - RNA, 21 nt, synthetic construct
  source 1..21: mol_type = other RNA
tggtgactacaagaggaagaa

SEQ ID NO: 68 - RNA, 21 nt, synthetic construct
  source 1..21: mol_type = other RNA
gcccaaggatgtagacaggaa

SEQ ID NO: 69 - RNA, 21 nt, synthetic construct
  source 1..21: mol_type = other RNA
ttctaccaagtctttggcata

SEQ ID NO: 70 - RNA, 21 nt, synthetic construct
  source 1..21: mol_type = other RNA
atgaccatctctgagtttgaa

SEQ ID NO: 71 - RNA, 21 nt, synthetic construct
  source 1..21: mol_type = other RNA
aatgaactgaagaagcaagca

SEQ ID NO: 72 - RNA, 21 nt, synthetic construct
  source 1..21: mol_type = other RNA
aggctctataaatatatatga

SEQ ID NO: 73 - RNA, 21 nt, synthetic construct
  source 1..21: mol_type = other RNA
atgtaaaatctctctactgaa

SEQ ID NO: 74 - RNA, 21 nt, synthetic construct
  source 1..21: mol_type = other RNA
cggtataatcctctcttgtga

SEQ ID NO: 75 - RNA, 21 nt, synthetic construct
  source 1..21: mol_type = other RNA
tgccatgagacttgcttttca

SEQ ID NO: 76 - RNA, 21 nt, synthetic construct
  source 1..21: mol_type = other RNA
ttttctgtactgtcaggcaaa

SEQ ID NO: 77 - RNA, 21 nt, synthetic construct
  source 1..21: mol_type = other RNA
gtcatcgagatatttttatga

SEQ ID NO: 78 - RNA, 21 nt, synthetic construct
  source 1..21: mol_type = other RNA
ttactttctcttttctaagta

SEQ ID NO: 79 - RNA, 21 nt, synthetic construct
  source 1..21: mol_type = other RNA
ctgaaacatctgtcctaacta

SEQ ID NO: 80 - RNA, 21 nt, synthetic construct
  source 1..21: mol_type = other RNA
caactctctttcctaaagaaa

SEQ ID NO: 81 - RNA, 21 nt, synthetic construct
  source 1..21: mol_type = other RNA
tgaagaagtctctcttctcta

SEQ ID NO: 82 - RNA, 21 nt, synthetic construct
  source 1..21: mol_type = other RNA
tttcttaaatttctagggcta

SEQ ID NO: 83 - RNA, 21 nt, synthetic construct
  source 1..21: mol_type = other RNA
ctgaccatgtggtttccacaa

SEQ ID NO: 84 - RNA, 21 nt, synthetic construct
  source 1..21: mol_type = other RNA
ctcccatgggaagatctgcaa

SEQ ID NO: 85 - RNA, 21 nt, synthetic construct
  source 1..21: mol_type = other RNA
aaatcagtgagcacctttgaa

SEQ ID NO: 86 - RNA, 21 nt, synthetic construct
  source 1..21: mol_type = other RNA
ccacgaagaactttctcaaca

SEQ ID NO: 87 - RNA, 21 nt, synthetic construct
  source 1..21: mol_type = other RNA
gcaatgcagttaaaagggtga

SEQ ID NO: 88 - RNA, 21 nt, synthetic construct
  source 1..21: mol_type = other RNA
gcctcaaatctagtcattaca

SEQ ID NO: 89 - RNA, 21 nt, synthetic construct
  source 1..21: mol_type = other RNA
ttacaccagtcaacagaagta

SEQ ID NO: 90 - RNA, 21 nt, synthetic construct
  source 1..21: mol_type = other RNA
ctcctcagctccttaacccta

SEQ ID NO: 91 - RNA, 21 nt, synthetic construct
  source 1..21: mol_type = other RNA
tggattgtaacctctccctta

SEQ ID NO: 92 - RNA, 21 nt, synthetic construct
  source 1..21: mol_type = other RNA
cttgtccaaatctaggattca

SEQ ID NO: 93 - RNA, 21 nt, synthetic construct
  source 1..21: mol_type = other RNA
tcctggtaggaaaaggaaaaa

SEQ ID NO: 94 - RNA, 21 nt, synthetic construct
  source 1..21: mol_type = other RNA
tccctccaccacttccaacta

SEQ ID NO: 95 - RNA, 21 nt, synthetic construct
  source 1..21: mol_type = other RNA
ctggacttggagaaccagaga

SEQ ID NO: 96 - RNA, 21 nt, synthetic construct
  source 1..21: mol_type = other RNA
cacctgttagaatcagagcta

SEQ ID NO: 97 - RNA, 21 nt, synthetic construct
  source 1..21: mol_type = other RNA
gctgcaggatttcttgggaca

SEQ ID NO: 98 - RNA, 21 nt, synthetic construct
  source 1..21: mol_type = other RNA
ttccctctttcaaggagaaga

SEQ ID NO: 99 - RNA, 21 nt, synthetic construct
  source 1..21: mol_type = other RNA
tgattgcagcttgtattctta

SEQ ID NO: 100 - RNA, 21 nt, synthetic construct
  source 1..21: mol_type = other RNA
tttagccttattacaatctaa

SEQ ID NO: 101 - RNA, 21 nt, synthetic construct
  source 1..21: mol_type = other RNA
ctatgtgcctgacaactcaaa

SEQ ID NO: 102 - RNA, 21 nt, synthetic construct
  source 1..21: mol_type = other RNA
ctccaactgaacaaccagaca

SEQ ID NO: 103 - RNA, 21 nt, synthetic construct
  source 1..21: mol_type = other RNA
cagacaactctcatcatccta

SEQ ID NO: 104 - RNA, 21 nt, synthetic construct
  source 1..21: mol_type = other RNA
atcctccagagagaaaataga

SEQ ID NO: 105 - RNA, 21 nt, synthetic construct
  source 1..21: mol_type = other RNA
aataggccgtgtctcaaagaa

SEQ ID NO: 106 - RNA, 21 nt, synthetic construct
  source 1..21: mol_type = other RNA
aaagaaaggttcttggtctaa

SEQ ID NO: 107 - RNA, 21 nt, synthetic construct
  source 1..21: mol_type = other RNA
tgctgcaaagttggccatgta

SEQ ID NO: 108 - RNA, 21 nt, synthetic construct
  source 1..21: mol_type = other RNA
atgtttcacagggaaacttta

SEQ ID NO: 109 - RNA, 21 nt, synthetic construct
  source 1..21: mol_type = other RNA
ctgcttatgagattccaaaaa

SEQ ID NO: 110 - RNA, 21 nt, synthetic construct
  source 1..21: mol_type = other RNA
caaaatgaagtgttggccaaa

SEQ ID NO: 111 - RNA, 21 nt, synthetic construct
  source 1..21: mol_type = other RNA
ccatcctggattttcccagta

SEQ ID NO: 112 - RNA, 21 nt, synthetic construct
  source 1..21: mol_type = other RNA
gtggcttcccttcctgctcga

SEQ ID NO: 113 - RNA, 21 nt, synthetic construct
  source 1..21: mol_type = other RNA
aaagcttaacctctcttctca

SEQ ID NO: 114 - RNA, 21 nt, synthetic construct
  source 1..21: mol_type = other RNA
ccaaacctttcaccttgaata

SEQ ID NO: 115 - RNA, 21 nt, synthetic construct
  source 1..21: mol_type = other RNA
tgaatgggtaatgtttggtga

SEQ ID NO: 116 - RNA, 21 nt, synthetic construct
  source 1..21: mol_type = other RNA
tgttccttcttggagaagcca

SEQ ID NO: 117 - RNA, 21 nt, synthetic construct
  source 1..21: mol_type = other RNA
gccttgagtcggaccatttta

SEQ ID NO: 118 - RNA, 21 nt, synthetic construct
  source 1..21: mol_type = other RNA
aaggatgaagaagtgaaaata

SEQ ID NO: 119 - RNA, 21 nt, synthetic construct
  source 1..21: mol_type = other RNA
atgacaataatgactctcaaa

SEQ ID NO: 120 - RNA, 21 nt, synthetic construct
  source 1..21: mol_type = other RNA
acatggcaaatgtagaactga

SEQ ID NO: 121 - RNA, 21 nt, synthetic construct
  source 1..21: mol_type = other RNA
ctgacttaaattgaacaaaca

SEQ ID NO: 122 - RNA, 21 nt, synthetic construct
  source 1..21: mol_type = other RNA
acctctgatgttgagcaccta

SEQ ID NO: 123 - RNA, 21 nt, synthetic construct
  source 1..21: mol_type = other RNA
tgaatactgagcactgaatga

SEQ ID NO: 124 - RNA, 21 nt, synthetic construct
  source 1..21: mol_type = other RNA
cagggatatgcctaccaataa

SEQ ID NO: 125 - RNA, 21 nt, synthetic construct
  source 1..21: mol_type = other RNA
aggcatgtacccaaacataaa

SEQ ID NO: 126 - RNA, 21 nt, synthetic construct
  source 1..21: mol_type = other RNA
acggatgtaaggcagaaagta

SEQ ID NO: 127 - RNA, 21 nt, synthetic construct
  source 1..21: mol_type = other RNA
atcggagaaggaatgagaaaa

SEQ ID NO: 128 - RNA, 21 nt, synthetic construct
  source 1..21: mol_type = other RNA
gtgatgttaatgaaaagtcaa

SEQ ID NO: 129 - RNA, 21 nt, synthetic construct
  source 1..21: mol_type = other RNA
agtcatatgcagctagagcaa

SEQ ID NO: 130 - RNA, 21 nt, synthetic construct
  source 1..21: mol_type = other RNA
ctttctggaagagattgcata

SEQ ID NO: 131 - RNA, 21 nt, synthetic construct
  source 1..21: mol_type = other RNA
attcaggaaggatctttgtaa

SEQ ID NO: 132 - RNA, 21 nt, synthetic construct
  source 1..21: mol_type = other RNA
agagggaagtctgctgtgtta

SEQ ID NO: 133 - RNA, 21 nt, synthetic construct
  source 1..21: mol_type = other RNA
tgttctcatgtaggatgtcaa

SEQ ID NO: 134 - RNA, 21 nt, synthetic construct
  source 1..21: mol_type = other RNA
tctctttttggccaatgtcta

SEQ ID NO: 135 - RNA, 21 nt, synthetic construct
  source 1..21: mol_type = other RNA
tgtcttttcactttcctgaca

SEQ ID NO: 136 - RNA, 21 nt, synthetic construct
  source 1..21: mol_type = other RNA
ctgaccctttagaatcatcca

SEQ ID NO: 137 - RNA, 21 nt, synthetic construct
  source 1..21: mol_type = other RNA
gcaatcatggaagttgcctta

SEQ ID NO: 138 - RNA, 21 nt, synthetic construct
  source 1..21: mol_type = other RNA
ttattgtcactggttaagaaa

SEQ ID NO: 139 - RNA, 21 nt, synthetic construct
  source 1..21: mol_type = other RNA
aagaacttggcgagattgaaa

SEQ ID NO: 140 - RNA, 21 nt, synthetic construct
  source 1..21: mol_type = other RNA
aagggcttttgttattgttga

SEQ ID NO: 141 - RNA, 21 nt, synthetic construct
  source 1..21: mol_type = other RNA
ttgttggatatttttgtttca

SEQ ID NO: 142 - RNA, 21 nt, synthetic construct
  source 1..21: mol_type = other RNA
ttcccataaaagcacatcata

SEQ ID NO: 143 - RNA, 23 nt, synthetic construct
  source 1..23: mol_type = other RNA
ttcctcagattggaatcccgggc

SEQ ID NO: 144 - RNA, 23 nt, synthetic construct
  source 1..23: mol_type = other RNA
tgtgagagcaaggagaaggaggc

SEQ ID NO: 145 - RNA, 23 nt, synthetic construct
  source 1..23: mol_type = other RNA
tcagctctgtatcctcaggtgct

SEQ ID NO: 146 - RNA, 23 nt, synthetic construct
  source 1..23: mol_type = other RNA
tcgaacctcactcatcacctggg

SEQ ID NO: 147 - RNA, 23 nt, synthetic construct
  source 1..23: mol_type = other RNA
tttaaatcttccgttcttcgaac

SEQ ID NO: 148 - RNA, 23 nt, synthetic construct
  source 1..23: mol_type = other RNA
ttctttcattcaatacggaggcc

SEQ ID NO: 149 - RNA, 23 nt, synthetic construct
  source 1..23: mol_type = other RNA
tttcatggtgatgtctttgcact

SEQ ID NO: 150 - RNA, 23 nt, synthetic construct
  source 1..23: mol_type = other RNA
ttaaggaatgctagtgttcatgg

SEQ ID NO: 151 - RNA, 23 nt, synthetic construct
  source 1..23: mol_type = other RNA
ttaaggattctgctgataaggaa

SEQ ID NO: 152 - RNA, 23 nt, synthetic construct
  source 1..23: mol_type = other RNA
tcactggatgacattggagctgc

SEQ ID NO: 153 - RNA, 23 nt, synthetic construct
  source 1..23: mol_type = other RNA
tatctgatgtggaagtggttgtt

SEQ ID NO: 154 - RNA, 23 nt, synthetic construct
  source 1..23: mol_type = other RNA
tatacttgacaggtgaagcatct

SEQ ID NO: 155 - RNA, 23 nt, synthetic construct
  source 1..23: mol_type = other RNA
tggttcttgaagaagaagcctga

SEQ ID NO: 156 - RNA, 23 nt, synthetic construct
  source 1..23: mol_type = other RNA
tgtgcagatgtactcctggttct

SEQ ID NO: 157 - RNA, 23 nt, synthetic construct
  source 1..23: mol_type = other RNA
tccatagagttgctggtagtcct

SEQ ID NO: 158 - RNA, 23 nt, synthetic construct
  source 1..23: mol_type = other RNA
tttcgcctgtgatgaagtcccgg

SEQ ID NO: 159 - RNA, 23 nt, synthetic construct
  source 1..23: mol_type = other RNA
tagctgcacacgaagcacttggg

SEQ ID NO: 160 - RNA, 23 nt, synthetic construct
  source 1..23: mol_type = other RNA
tggaaaggcttcctgcacaagct

SEQ ID NO: 161 - RNA, 23 nt, synthetic construct
  source 1..23: mol_type = other RNA
taggtcaccttgtctccaatggg

SEQ ID NO: 162 - RNA, 23 nt, synthetic construct
  source 1..23: mol_type = other RNA
tattctttaccgctgaaggtcac

SEQ ID NO: 163 - RNA, 23 nt, synthetic construct
  source 1..23: mol_type = other RNA
tacgtttggcacacacattcttt

SEQ ID NO: 164 - RNA, 23 nt, synthetic construct
  source 1..23: mol_type = other RNA
ttcttgatgggcttactgctggc

SEQ ID NO: 165 - RNA, 23 nt, synthetic construct
  source 1..23: mol_type = other RNA
taggtctggcacttgaagcagct

SEQ ID NO: 166 - RNA, 23 nt, synthetic construct
  source 1..23: mol_type = other RNA
ttcacagtatggaacaccatcct

SEQ ID NO: 167 - RNA, 23 nt, synthetic construct
  source 1..23: mol_type = other RNA
taagtctcacatttaatgccaaa

SEQ ID NO: 168 - RNA, 23 nt, synthetic construct
  source 1..23: mol_type = other RNA
tcactgatgtatcggtcacaagt

SEQ ID NO: 169 - RNA, 23 nt, synthetic construct
  source 1..23: mol_type = other RNA
tcttcggtgaacatctggtggca

SEQ ID NO: 170 - RNA, 23 nt, synthetic construct
  source 1..23: mol_type = other RNA
ttgtgaggtacatttcctctcct

SEQ ID NO: 171 - RNA, 23 nt, synthetic construct
  source 1..23: mol_type = other RNA
tccaaacctcggaacctgtgagg

SEQ ID NO: 172 - RNA, 23 nt, synthetic construct
  source 1..23: mol_type = other RNA
tagatgtccgtctatgctttaac

SEQ ID NO: 173 - RNA, 23 nt, synthetic construct
  source 1..23: mol_type = other RNA
ttgagatggaggtttcagatgtc

SEQ ID NO: 174 - RNA, 23 nt, synthetic construct
  source 1..23: mol_type = other RNA
tactttagcgcagatgactcggt

SEQ ID NO: 175 - RNA, 23 nt, synthetic construct
  source 1..23: mol_type = other RNA
ttctttgtaattaaggatctcat

SEQ ID NO: 176 - RNA, 23 nt, synthetic construct
  source 1..23: mol_type = other RNA
tgttgtacctcgtagatagactt

SEQ ID NO: 177 - RNA, 23 nt, synthetic construct
  source 1..23: mol_type = other RNA
tgaatgaggctcataggaaatga

SEQ ID NO: 178 - RNA, 23 nt, synthetic construct
  source 1..23: mol_type = other RNA
ttcggacatgtatctggaatgag

SEQ ID NO: 179 - RNA, 23 nt, synthetic construct
  source 1..23: mol_type = other RNA
tctctccagcatctcgtcggaca

SEQ ID NO: 180 - RNA, 23 nt, synthetic construct
  source 1..23: mol_type = other RNA
tagataatgttcccagcgactct

SEQ ID NO: 181 - RNA, 23 nt, synthetic construct
  source 1..23: mol_type = other RNA
taggttctcgtagatgtcctggg

SEQ ID NO: 182 - RNA, 23 nt, synthetic construct
  source 1..23: mol_type = other RNA
tcagagcggtagtagtggtgagg

SEQ ID NO: 183 - RNA, 23 nt, synthetic construct
  source 1..23: mol_type = other RNA
tatctaactggctatggtatgga

SEQ ID NO: 184 - RNA, 23 nt, synthetic construct
  source 1..23: mol_type = other RNA
tctggtaagaggttggagtggag

SEQ ID NO: 185 - RNA, 23 nt, synthetic construct
  source 1..23: mol_type = other RNA
tgatgtgaaagtgcttgggagcc

SEQ ID NO: 186 - RNA, 23 nt, synthetic construct
  source 1..23: mol_type = other RNA
tttccggtagatgttactgtctc

SEQ ID NO: 187 - RNA, 23 nt, synthetic construct
  source 1..23: mol_type = other RNA
tttgctgtagacaaatcaccatg

SEQ ID NO: 188 - RNA, 23 nt, synthetic construct
  source 1..23: mol_type = other RNA
ttggctgatgtcttcacttgttt

SEQ ID NO: 189 - RNA, 23 nt, synthetic construct
  source 1..23: mol_type = other RNA
tatgggactgtacttggaggtct

SEQ ID NO: 190 - RNA, 23 nt, synthetic construct
  source 1..23: mol_type = other RNA
tgtccagtactcagactccgaag

SEQ ID NO: 191 - RNA, 23 nt, synthetic construct
  source 1..23: mol_type = other RNA
tcagacgagaaccttctggctcg

SEQ ID NO: 192 - RNA, 23 nt, synthetic construct
  source 1..23: mol_type = other RNA
tcggtcaaaatcatcctcctctc

SEQ ID NO: 193 - RNA, 23 nt, synthetic construct
  source 1..23: mol_type = other RNA
taattccactttggagcttgtgc

SEQ ID NO: 194 - RNA, 23 nt, synthetic construct
  source 1..23: mol_type = other RNA
ttcttccttcagaatcagccggc

SEQ ID NO: 195 - RNA, 23 nt, synthetic construct
  source 1..23: mol_type = other RNA
tcagggatctgcataggagctcg

SEQ ID NO: 196 - RNA, 23 nt, synthetic construct
  source 1..23: mol_type = other RNA
ttgagggacatctcatagccagc

SEQ ID NO: 197 - RNA, 23 nt, synthetic construct
  source 1..23: mol_type = other RNA
tcagatttggagatgagaggatc

SEQ ID NO: 198 - RNA, 23 nt, synthetic construct
  source 1..23: mol_type = other RNA
tagcccatttcttcggtaggcag

SEQ ID NO: 199 - RNA, 23 nt, synthetic construct
  source 1..23: mol_type = other RNA
tatgctgtcgtagtggaagaggt

SEQ ID NO: 200 - RNA, 23 nt, synthetic construct
  source 1..23: mol_type = other RNA
tcagttgactgcgttcatgctgt

SEQ ID NO: 201 - RNA, 23 nt, synthetic construct
  source 1..23: mol_type = other RNA
tttcataagggtagatcttgtac

SEQ ID NO: 202 - RNA, 23 nt, synthetic construct
  source 1..23: mol_type = other RNA
ttcttcctcttgtagtcaccagc

SEQ ID NO: 203 - RNA, 23 nt, synthetic construct
  source 1..23: mol_type = other RNA
ttcctgtctacatccttgggcag

SEQ ID NO: 204 - RNA, 23 nt, synthetic construct
  source 1..23: mol_type = other RNA
tatgccaaagacttggtagaact

SEQ ID NO: 205 - RNA, 23 nt, synthetic construct
  source 1..23: mol_type = other RNA
ttcaaactcagagatggtcatgc

SEQ ID NO: 206 - RNA, 23 nt, synthetic construct
  source 1..23: mol_type = other RNA
tgcttgcttcttcagttcattcc

SEQ ID NO: 207 - RNA, 23 nt, synthetic construct
  source 1..23: mol_type = other RNA
tcatatatatttatagagcctct

SEQ ID NO: 208 - RNA, 23 nt, synthetic construct
  source 1..23: mol_type = other RNA
ttcagtagagagattttacatat

SEQ ID NO: 209 - RNA, 23 nt, synthetic construct
  source 1..23: mol_type = other RNA
tcacaagagaggattataccgag

SEQ ID NO: 210 - RNA, 23 nt, synthetic construct
  source 1..23: mol_type = other RNA
tgaaaagcaagtctcatggcagg

SEQ ID NO: 211 - RNA, 23 nt, synthetic construct
  source 1..23: mol_type = other RNA
tttgcctgacagtacagaaaagc

SEQ ID NO: 212 - RNA, 23 nt, synthetic construct
  source 1..23: mol_type = other RNA
tcataaaaatatctcgatgacgt

SEQ ID NO: 213 - RNA, 23 nt, synthetic construct
  source 1..23: mol_type = other RNA
tacttagaaaagagaaagtaagg

SEQ ID NO: 214 - RNA, 23 nt, synthetic construct
  source 1..23: mol_type = other RNA
tagttaggacagatgtttcagta

SEQ ID NO: 215 - RNA, 23 nt, synthetic construct
  source 1..23: mol_type = other RNA
tttctttaggaaagagagttgga

SEQ ID NO: 216 - RNA, 23 nt, synthetic construct
  source 1..23: mol_type = other RNA
tagagaagagagacttcttcagg

SEQ ID NO: 217 - RNA, 23 nt, synthetic construct
  source 1..23: mol_type = other RNA
tagccctagaaatttaagaaagg

SEQ ID NO: 218 - RNA, 23 nt, synthetic construct
  source 1..23: mol_type = other RNA
ttgtggaaaccacatggtcagca

SEQ ID NO: 219 - RNA, 23 nt, synthetic construct
  source 1..23: mol_type = other RNA
ttgcagatcttcccatgggaggg

SEQ ID NO: 220 - RNA, 23 nt, synthetic construct
  source 1..23: mol_type = other RNA
ttcaaaggtgctcactgatttgg

SEQ ID NO: 221 - RNA, 23 nt, synthetic construct
  source 1..23: mol_type = other RNA
tgttgagaaagttcttcgtgggc

SEQ ID NO: 222 - RNA, 23 nt, synthetic construct
  source 1..23: mol_type = other RNA
tcacccttttaactgcattgccc

SEQ ID NO: 223 - RNA, 23 nt, synthetic construct
  source 1..23: mol_type = other RNA
tgtaatgactagatttgaggctc

SEQ ID NO: 224 - RNA, 23 nt, synthetic construct
  source 1..23: mol_type = other RNA
tacttctgttgactggtgtaatg

SEQ ID NO: 225 - RNA, 23 nt, synthetic construct
  source 1..23: mol_type = other RNA
tagggttaaggagctgaggagag

SEQ ID NO: 226 - RNA, 23 nt, synthetic construct
  source 1..23: mol_type = other RNA
taagggagaggttacaatccagg

SEQ ID NO: 227 - RNA, 23 nt, synthetic construct
  source 1..23: mol_type = other RNA
tgaatcctagatttggacaaggg

SEQ ID NO: 228 - RNA, 23 nt, synthetic construct
  source 1..23: mol_type = other RNA
tttttccttttcctaccaggaat

SEQ ID NO: 229 - RNA, 23 nt, synthetic construct
  source 1..23: mol_type = other RNA
tagttggaagtggtggagggaag

SEQ ID NO: 230 - RNA, 23 nt, synthetic construct
  source 1..23: mol_type = other RNA
tctctggttctccaagtccaggt

SEQ ID NO: 231 - RNA, 23 nt, synthetic construct
  source 1..23: mol_type = other RNA
tagctctgattctaacaggtgcc

SEQ ID NO: 232 - RNA, 23 nt, synthetic construct
  source 1..23: mol_type = other RNA
tgtcccaagaaatcctgcagctc

SEQ ID NO: 233 - RNA, 23 nt, synthetic construct
  source 1..23: mol_type = other RNA
tcttctccttgaaagagggaagg

SEQ ID NO: 234 - RNA, 23 nt, synthetic construct
  source 1..23: mol_type = other RNA
taagaatacaagctgcaatcatg

SEQ ID NO: 235 - RNA, 23 nt, synthetic construct
  source 1..23: mol_type = other RNA
ttagattgtaataaggctaaaga

SEQ ID NO: 236 - RNA, 23 nt, synthetic construct
  source 1..23: mol_type = other RNA
tttgagttgtcaggcacatagat

SEQ ID NO: 237 - RNA, 23 nt, synthetic construct
  source 1..23: mol_type = other RNA
tgtctggttgttcagttggagct

SEQ ID NO: 238 - RNA, 23 nt, synthetic construct
  source 1..23: mol_type = other RNA
taggatgatgagagttgtctgtc

SEQ ID NO: 239 - RNA, 23 nt, synthetic construct
  source 1..23: mol_type = other RNA
tctattttctctctggaggatga

SEQ ID NO: 240 - RNA, 23 nt, synthetic construct
  source 1..23: mol_type = other RNA
ttctttgagacacggcctatttt

SEQ ID NO: 241 - RNA, 23 nt, synthetic construct
  source 1..23: mol_type = other RNA
ttagaccaagaacctttctttga

SEQ ID NO: 242 - RNA, 23 nt, synthetic construct
  source 1..23: mol_type = other RNA
tacatggccaactttgcagcagg

SEQ ID NO: 243 - RNA, 23 nt, synthetic construct
  source 1..23: mol_type = other RNA
taaagtttccctgtgaaacatgg

SEQ ID NO: 244 - RNA, 23 nt, synthetic construct
  source 1..23: mol_type = other RNA
tttttggaatctcataagcagcc

SEQ ID NO: 245 - RNA, 23 nt, synthetic construct
  source 1..23: mol_type = other RNA
tttggccaacacttcattttgga

SEQ ID NO: 246 - RNA, 23 nt, synthetic construct
  source 1..23: mol_type = other RNA
tactgggaaaatccaggatggcc

SEQ ID NO: 247 - RNA, 23 nt, synthetic construct
  source 1..23: mol_type = other RNA
tcgagcaggaagggaagccactg

SEQ ID NO: 248 - RNA, 23 nt, synthetic construct
  source 1..23: mol_type = other RNA
tgagaagagaggttaagctttct

SEQ ID NO: 249 - RNA, 23 nt, synthetic construct
  source 1..23: mol_type = other RNA
tattcaaggtgaaaggtttggag

SEQ ID NO: 250 - RNA, 23 nt, synthetic construct
  source 1..23: mol_type = other RNA
tcaccaaacattacccattcaag

SEQ ID NO: 251 - RNA, 23 nt, synthetic construct
  source 1..23: mol_type = other RNA
tggcttctccaagaaggaacagc

SEQ ID NO: 252 - RNA, 23 nt, synthetic construct
  source 1..23: mol_type = other RNA
taaaatggtccgactcaaggctt

SEQ ID NO: 253 - RNA, 23 nt, synthetic construct
  source 1..23: mol_type = other RNA
tattttcacttcttcatccttcc

SEQ ID NO: 254 - RNA, 23 nt, synthetic construct
  source 1..23: mol_type = other RNA
tttgagagtcattattgtcattt

SEQ ID NO: 255 - RNA, 23 nt, synthetic construct
  source 1..23: mol_type = other RNA
tcagttctacatttgccatgtca

SEQ ID NO: 256 - RNA, 23 nt, synthetic construct
  source 1..23: mol_type = other RNA
tgtttgttcaatttaagtcagtt

SEQ ID NO: 257 - RNA, 23 nt, synthetic construct
  source 1..23: mol_type = other RNA
taggtgctcaacatcagaggtgc

SEQ ID NO: 258 - RNA, 23 nt, synthetic construct
  source 1..23: mol_type = other RNA
tcattcagtgctcagtattcagc

SEQ ID NO: 259 - RNA, 23 nt, synthetic construct
  source 1..23: mol_type = other RNA
ttattggtaggcatatccctgag

SEQ ID NO: 260 - RNA, 23 nt, synthetic construct
  source 1..23: mol_type = other RNA
tttatgtttgggtacatgcctta

SEQ ID NO: 261 - RNA, 23 nt, synthetic construct
  source 1..23: mol_type = other RNA
tactttctgccttacatccgtta

SEQ ID NO: 262 - RNA, 23 nt, synthetic construct
  source 1..23: mol_type = other RNA
ttttctcattccttctccgatca

SEQ ID NO: 263 - RNA, 23 nt, synthetic construct
  source 1..23: mol_type = other RNA
ttgacttttcattaacatcacgc

SEQ ID NO: 264 - RNA, 23 nt, synthetic construct
  source 1..23: mol_type = other RNA
ttgctctagctgcatatgacttt

SEQ ID NO: 265 - RNA, 23 nt, synthetic construct
  source 1..23: mol_type = other RNA
tatgcaatctcttccagaaagct

SEQ ID NO: 266 - RNA, 23 nt, synthetic construct
  source 1..23: mol_type = other RNA
ttacaaagatccttcctgaattt

SEQ ID NO: 267 - RNA, 23 nt, synthetic construct
  source 1..23: mol_type = other RNA
taacacagcagacttccctctgg

SEQ ID NO: 268 - RNA, 23 nt, synthetic construct
  source 1..23: mol_type = other RNA
ttgacatcctacatgagaacaca

SEQ ID NO: 269 - RNA, 23 nt, synthetic construct
  source 1..23: mol_type = other RNA
tagacattggccaaaaagagaag

SEQ ID NO: 270 - RNA, 23 nt, synthetic construct
  source 1..23: mol_type = other RNA
tgtcaggaaagtgaaaagacatt

SEQ ID NO: 271 - RNA, 23 nt, synthetic construct
  source 1..23: mol_type = other RNA
tggatgattctaaagggtcagga

SEQ ID NO: 272 - RNA, 23 nt, synthetic construct
  source 1..23: mol_type = other RNA
taaggcaacttccatgattgcgt

SEQ ID NO: 273 - RNA, 23 nt, synthetic construct
  source 1..23: mol_type = other RNA
tttcttaaccagtgacaataagg

SEQ ID NO: 274 - RNA, 23 nt, synthetic construct
  source 1..23: mol_type = other RNA
tttcaatctcgccaagttcttaa

SEQ ID NO: 275 - RNA, 23 nt, synthetic construct
  source 1..23: mol_type = other RNA
tcaacaataacaaaagcccttca

SEQ ID NO: 276 - RNA, 23 nt, synthetic construct
  source 1..23: mol_type = other RNA
tgaaacaaaaatatccaacaaca

SEQ ID NO: 277 - RNA, 23 nt, synthetic construct
  source 1..23: mol_type = other RNA
tatgatgtgcttttatgggaaac

SEQ ID NO: 278 - RNA, 21 nt, synthetic construct
  source 1..21: mol_type = other RNA
  modified_base 1: mod_base = OTHER; note = 2'-O-methylcytidine-3'-phosphorothioate
  modified_base 2: mod_base = OTHER; note = 2'-O-methylcytidine-3'-phosphorothioate
  modified_base 3: mod_base = OTHER; note = 2'-O-methylguanosine-3'-phosphate
  modified_base 4: mod_base = OTHER; note = 2'-O-methylguanosine-3'-phosphate
  modified_base 5: mod_base = OTHER; note = 2'-O-methylguanosine-3'-phosphate
  modified_base 6: mod_base = OTHER; note = 2'-O-hexadecyl-adenosine-3'-phosphate
  modified_base 7: mod_base = OTHER; note = 2'-deoxy-2'-fluorouridine-3'-phosphate
  modified_base 8: mod_base = OTHER; note = 2'-O-methyluridine-3'-phosphate
  modified_base 9: mod_base = OTHER; note = 2'-deoxy-2'-fluorocytidine-3'-phosphate
  modified_base 10: mod_base = OTHER; note = 2'-deoxy-2'-fluorocytidine-3'-phosphate
  modified_base 11: mod_base = OTHER; note = 2'-deoxy-2'-fluoroadenosine-3'-phosphate
  modified_base 12: mod_base = OTHER; note = 2'-O-methyladenosine-3'-phosphate
  modified_base 13: mod_base = OTHER; note = 2'-O-methyluridine-3'-phosphate
  modified_base 14: mod_base = OTHER; note = 2'-O-methylcytidine-3'-phosphate
  modified_base 15: mod_base = OTHER; note = 2'-O-methyluridine-3'-phosphate
  modified_base 16: mod_base = OTHER; note = 2'-O-methylguanosine-3'-phosphate
  modified_base 17: mod_base = OTHER; note = 2'-O-methyladenosine-3'-phosphate
  modified_base 18: mod_base = OTHER; note = 2'-O-methylguanosine-3'-phosphate
  modified_base 19: mod_base = OTHER; note = 2'-O-methylguanosine-3'-phosphorothioate
  modified_base 20: mod_base = OTHER; note = 2'-O-methyladenosine-3'-phosphorothioate
  modified_base 21: mod_base = OTHER; note = 2'-O-methyladenosine
ccgggattccaatctgaggaa

SEQ ID NO: 279 - RNA, 21 nt, synthetic construct
  source 1..21: mol_type = other RNA
  modified_base 1: mod_base = OTHER; note = 2'-O-methylcytidine-3'-phosphorothioate
  modified_base 2: mod_base = OTHER; note = 2'-O-methyluridine-3'-phosphorothioate
  modified_base 3: mod_base = OTHER; note = 2'-O-methylcytidine-3'-phosphate
  modified_base 4: mod_base = OTHER; note = 2'-O-methylcytidine-3'-phosphate
  modified_base 5: mod_base = OTHER; note = 2'-O-methyluridine-3'-phosphate
  modified_base 6: mod_base = OTHER; note = 2'-O-hexadecyl-uridine-3'-phosphate
  modified_base 7: mod_base = OTHER; note = 2'-deoxy-2'-fluorocytidine-3'-phosphate
  modified_base 8: mod_base = OTHER; note = 2'-O-methyluridine-3'-phosphate
  modified_base 9: mod_base = OTHER; note = 2'-deoxy-2'-fluorocytidine-3'-phosphate
  modified_base 10: mod_base = OTHER; note = 2'-deoxy-2'-fluorocytidine-3'-phosphate
  modified_base 11: mod_base = OTHER; note = 2'-deoxy-2'-fluorouridine-3'-phosphate
  modified_base 12: mod_base = OTHER; note = 2'-O-methyluridine-3'-phosphate
  modified_base 13: mod_base = OTHER; note = 2'-O-methylguanosine-3'-phosphate
  modified_base 14: mod_base = OTHER; note = 2'-O-methylcytidine-3'-phosphate
  modified_base 15: mod_base = OTHER; note = 2'-O-methyluridine-3'-phosphate
  modified_base 16: mod_base = OTHER; note = 2'-O-methylcytidine-3'-phosphate
  modified_base 17: mod_base = OTHER; note = 2'-O-methyluridine-3'-phosphate
  modified_base 18: mod_base = OTHER; note = 2'-O-methylcytidine-3'-phosphate
  modified_base 19: mod_base = OTHER; note = 2'-O-methyladenosine-3'-phosphorothioate
  modified_base 20: mod_base = OTHER; note = 2'-O-methylcytidine-3'-phosphorothioate
  modified_base 21: mod_base = OTHER; note = 2'-O-methyladenosine
ctccttctccttgctctcaca

SEQ ID NO: 280 - RNA, 21 nt, synthetic construct
  source 1..21: mol_type = other RNA
  modified_base 1: mod_base = OTHER; note = 2'-O-methylcytidine-3'-phosphorothioate
  modified_base 2: mod_base = OTHER; note = 2'-O-methyladenosine-3'-phosphorothioate
  modified_base 3: mod_base = OTHER; note = 2'-O-methylcytidine-3'-phosphate
  modified_base 4: mod_base = OTHER; note = 2'-O-methylcytidine-3'-phosphate
  modified_base 5: mod_base = OTHER; note = 2'-O-methyluridine-3'-phosphate
  modified_base 6: mod_base = OTHER; note = 2'-O-hexadecyl-guanosine-3'-phosphate
  modified_base 7: mod_base = OTHER; note = 2'-deoxy-2'-fluoroadenosine-3'-phosphate
  modified_base 8: mod_base = OTHER; note = 2'-O-methylguanosine-3'-phosphate
  modified_base 9: mod_base = OTHER; note = 2'-deoxy-2'-fluoroguanosine-3'-phosphate
  modified_base 10: mod_base = OTHER; note = 2'-deoxy-2'-fluoroadenosine-3'-phosphate
  modified_base 11: mod_base = OTHER; note = 2'-deoxy-2'-fluorouridine-3'-phosphate
  modified_base 12: mod_base = OTHER; note = 2'-O-methyladenosine-3'-phosphate
  modified_base 13: mod_base = OTHER; note = 2'-O-methylcytidine-3'-phosphate
  modified_base 14: mod_base = OTHER; note = 2'-O-methyladenosine-3'-phosphate
  modified_base 15: mod_base = OTHER; note = 2'-O-methylguanosine-3'-phosphate
  modified_base 16: mod_base = OTHER; note = 2'-O-methyladenosine-3'-phosphate
  modified_base 17: mod_base = OTHER; note = 2'-O-methylguanosine-3'-phosphate
  modified_base 18: mod_base = OTHER; note = 2'-O-methylcytidine-3'-phosphate
  modified_base 19: mod_base = OTHER; note = 2'-O-methyluridine-3'-phosphorothioate
  modified_base 20: mod_base = OTHER; note = 2'-O-methylguanosine-3'-phosphorothioate
  modified_base 21: mod_base = OTHER; note = 2'-O-methyladenosine
cacctgaggatacagagctga

SEQ ID NO: 281 - RNA, 21 nt, synthetic construct
  source 1..21: mol_type = other RNA
  modified_base 1: mod_base = OTHER; note = 2'-O-methylcytidine-3'-phosphorothioate
  modified_base 2: mod_base = OTHER; note = 2'-O-methyladenosine-3'-phosphorothioate
  modified_base 3: mod_base = OTHER; note = 2'-O-methylguanosine-3'-phosphate
  modified_base 4: mod_base = OTHER; note = 2'-O-methylguanosine-3'-phosphate
  modified_base 5: mod_base = OTHER; note = 2'-O-methyluridine-3'-phosphate
  modified_base 6: mod_base = OTHER; note = 2'-O-hexadecyl-guanosine-3'-phosphate
  modified_base 7: mod_base = OTHER; note = 2'-deoxy-2'-fluoroadenosine-3'-phosphate
  modified_base 8: mod_base = OTHER; note = 2'-O-methyluridine-3'-phosphate
  modified_base 9: mod_base = OTHER; note = 2'-deoxy-2'-fluoroguanosine-3'-phosphate
  modified_base 10: mod_base = OTHER; note = 2'-deoxy-2'-fluoroadenosine-3'-phosphate
  modified_base 11: mod_base = OTHER; note = 2'-deoxy-2'-fluoroguanosine-3'-phosphate
  modified_base 12: mod_base = OTHER; note = 2'-O-methyluridine-3'-phosphate
  modified_base 13: mod_base = OTHER; note = 2'-O-methylguanosine-3'-phosphate
  modified_base 14: mod_base = OTHER; note = 2'-O-methyladenosine-3'-phosphate
  modified_base 15: mod_base = OTHER; note = 2'-O-methylguanosine-3'-phosphate
  modified_base 16: mod_base = OTHER; note = 2'-O-methylguanosine-3'-phosphate
  modified_base 17: mod_base = OTHER; note = 2'-O-methyluridine-3'-phosphate
  modified_base 18: mod_base = OTHER; note = 2'-O-methyluridine-3'-phosphate
  modified_base 19: mod_base = OTHER; note = 2'-O-methylcytidine-3'-phosphorothioate
  modified_base 20: mod_base = OTHER; note = 2'-O-methylguanosine-3'-phosphorothioate
  modified_base 21: mod_base = OTHER; note = 2'-O-methyladenosine
caggtgatgagtgaggttcga

SEQ ID NO: 282 - RNA, 21 nt, synthetic construct
  source 1..21: mol_type = other RNA
  modified_base 1: mod_base = OTHER; note = 2'-O-methyluridine-3'-phosphorothioate
  modified_base 2: mod_base = OTHER; note = 2'-O-methylcytidine-3'-phosphorothioate
  modified_base 3: mod_base = OTHER; note = 2'-O-methylguanosine-3'-phosphate
  modified_base 4: mod_base = OTHER; note = 2'-O-methyladenosine-3'-phosphate
  modified_base 5: mod_base = OTHER; note = 2'-O-methyladenosine-3'-phosphate
  modified_base 6: mod_base = OTHER; note = 2'-O-hexadecyl-guanosine-3'-phosphate
  modified_base 7: mod_base = OTHER; note = 2'-deoxy-2'-fluoroadenosine-3'-phosphate
  modified_base 8: mod_base = OTHER; note = 2'-O-methyladenosine-3'-phosphate
  modified_base 9: mod_base = OTHER; note = 2'-deoxy-2'-fluorocytidine-3'-phosphate
  modified_base 10: mod_base = OTHER; note = 2'-deoxy-2'-fluoroguanosine-3'-phosphate
  modified_base 11: mod_base = OTHER; note = 2'-deoxy-2'-fluoroguanosine-3'-phosphate
  modified_base 12: mod_base = OTHER; note = 2'-O-methyladenosine-3'-phosphate
  modified_base 13: mod_base = OTHER; note = 2'-O-methyladenosine-3'-phosphate
  modified_base 14: mod_base = OTHER; note = 2'-O-methylguanosine-3'-phosphate
  modified_base 15: mod_base = OTHER; note = 2'-O-methyladenosine-3'-phosphate
  modified_base 16: mod_base = OTHER; note = 2'-O-methyluridine-3'-phosphate
  modified_base 17: mod_base = OTHER; note = 2'-O-methyluridine-3'-phosphate
  modified_base 18: mod_base = OTHER; note = 2'-O-methyluridine-3'-phosphate
  modified_base 19: mod_base = OTHER; note = 2'-O-methyladenosine-3'-phosphorothioate
  modified_base 20: mod_base = OTHER; note = 2'-O-methyladenosine-3'-phosphorothioate
  modified_base 21: mod_base = OTHER; note = 2'-O-methyladenosine
tcgaagaacggaagatttaaa

SEQ ID NO: 283 - RNA, 21 nt, synthetic construct
  source 1..21: mol_type = other RNA
  modified_base 1: mod_base = OTHER; note = 2'-O-methylcytidine-3'-phosphorothioate
  modified_base 2: mod_base = OTHER; note = 2'-O-methylcytidine-3'-phosphorothioate
  modified_base 3: mod_base = OTHER; note = 2'-O-methyluridine-3'-phosphate
  modified_base 4: mod_base = OTHER; note = 2'-O-methylcytidine-3'-phosphate
  modified_base 5: mod_base = OTHER; note = 2'-O-methylcytidine-3'-phosphate
  modified_base 6: mod_base = OTHER; note = 2'-O-hexadecyl-guanosine-3'-phosphate
  modified_base 7: mod_base = OTHER; note = 2'-deoxy-2'-fluorouridine-3'-phosphate
  modified_base 8: mod_base = OTHER; note = 2'-O-methyladenosine-3'-phosphate
  modified_base 9: mod_base = OTHER; note = 2'-deoxy-2'-fluorouridine-3'-phosphate
  modified_base 10: mod_base = OTHER; note = 2'-deoxy-2'-fluorouridine-3'-phosphate
  modified_base 11: mod_base = OTHER; note = 2'-deoxy-2'-fluoroguanosine-3'-phosphate
  modified_base 12: mod_base = OTHER; note = 2'-O-methyladenosine-3'-phosphate
  modified_base 13: mod_base = OTHER; note = 2'-O-methyladenosine-3'-phosphate
  modified_base 14: mod_base = OTHER; note = 2'-O-methyluridine-3'-phosphate
  modified_base 15: mod_base = OTHER; note = 2'-O-methylguanosine-3'-phosphate
  modified_base 16: mod_base = OTHER; note = 2'-O-methyladenosine-3'-phosphate
  modified_base 17: mod_base = OTHER; note = 2'-O-methyladenosine-3'-phosphate
  modified_base 18: mod_base = OTHER; note = 2'-O-methyladenosine-3'-phosphate
  modified_base 19: mod_base = OTHER; note = 2'-O-methylguanosine-3'-phosphorothioate
  modified_base 20: mod_base = OTHER; note = 2'-O-methyladenosine-3'-phosphorothioate
  modified_base 21: mod_base = OTHER; note = 2'-O-methyladenosine
cctccgtattgaatgaaagaa

SEQ ID NO: 284 - RNA, 21 nt, synthetic construct
  source 1..21: mol_type = other RNA
  modified_base 1: mod_base = OTHER; note = 2'-O-methyluridine-3'-phosphorothioate
  modified_base 2: mod_base = OTHER; note = 2'-O-methylguanosine-3'-phosphorothioate
  modified_base 3: mod_base = OTHER; note = 2'-O-methylcytidine-3'-phosphate
  modified_base 4: mod_base = OTHER; note = 2'-O-methyladenosine-3'-phosphate
  modified_base 5: mod_base = OTHER; note = 2'-O-methyladenosine-3'-phosphate
  modified_base 6: mod_base = OTHER; note = 2'-O-hexadecyl-adenosine-3'-phosphate
  modified_base 7: mod_base = OTHER; note = 2'-deoxy-2'-fluoroguanosine-3'-phosphate
  modified_base 8: mod_base = OTHER; note = 2'-O-methyladenosine-3'-phosphate
  modified_base 9: mod_base = OTHER; note = 2'-deoxy-2'-fluorocytidine-3'-phosphate
  modified_base 10: mod_base = OTHER; note = 2'-deoxy-2'-fluoroadenosine-3'-phosphate
  modified_base 11: mod_base = OTHER; note = 2'-deoxy-2'-fluorouridine-3'-phosphate
  modified_base 12: mod_base = OTHER; note = 2'-O-methylcytidine-3'-phosphate
  modified_base 13: mod_base = OTHER; note = 2'-O-methyladenosine-3'-phosphate
  modified_base 14: mod_base = OTHER; note = 2'-O-methylcytidine-3'-phosphate
  modified_base 15: mod_base = OTHER; note = 2'-O-methylcytidine-3'-phosphate
  modified_base 16: mod_base = OTHER; note = 2'-O-methyladenosine-3'-phosphate
  modified_base 17: mod_base = OTHER; note = 2'-O-methyluridine-3'-phosphate
  modified_base 18: mod_base = OTHER; note = 2'-O-methylguanosine-3'-phosphate
  modified_base 19: mod_base = OTHER; note = 2'-O-methyladenosine-3'-phosphorothioate
  modified_base 20: mod_base = OTHER; note = 2'-O-methyladenosine-3'-phosphorothioate
  modified_base 21: mod_base = OTHER; note = 2'-O-methyladenosine
tgcaaagacatcaccatgaaa

SEQ ID NO: 285 - RNA, 21 nt, synthetic construct
  source 1..21: mol_type = other RNA
  modified_base 1: mod_base = OTHER; note = 2'-O-methyladenosine-3'-phosphorothioate
  modified_base 2: mod_base = OTHER; note = 2'-O-methyluridine-3'-phosphorothioate
  modified_base 3: mod_base = OTHER; note = 2'-O-methylguanosine-3'-phosphate
  modified_base 4: mod_base = OTHER; note = 2'-O-methyladenosine-3'-phosphate
  modified_base 5: mod_base = OTHER; note = 2'-O-methyladenosine-3'-phosphate
  modified_base 6: mod_base = OTHER; note = 2'-O-hexadecyl-cytidine-3'-phosphate
  modified_base 7: mod_base = OTHER; note = 2'-deoxy-2'-fluoroadenosine-3'-phosphate
  modified_base 8: mod_base = OTHER; note = 2'-O-methylcytidine-3'-phosphate
  modified_base 9: mod_base = OTHER; note = 2'-deoxy-2'-fluorouridine-3'-phosphate
  modified_base 10: mod_base = OTHER; note = 2'-deoxy-2'-fluoroadenosine-3'-phosphate
  modified_base 11: mod_base = OTHER; note = 2'-deoxy-2'-fluoroguanosine-3'-phosphate
  modified_base 12: mod_base = OTHER; note = 2'-O-methylcytidine-3'-phosphate
  modified_base 13: mod_base = OTHER; note = 2'-O-methyladenosine-3'-phosphate
  modified_base 14: mod_base = OTHER; note = 2'-O-methyluridine-3'-phosphate
  modified_base 15: mod_base = OTHER; note = 2'-O-methyluridine-3'-phosphate
  modified_base 16: mod_base = OTHER; note = 2'-O-methylcytidine-3'-phosphate
  modified_base 17: mod_base = OTHER; note = 2'-O-methylcytidine-3'-phosphate
  modified_base 18: mod_base = OTHER; note = 2'-O-methyluridine-3'-phosphate
  modified_base 19: mod_base = OTHER; note = 2'-O-methyluridine-3'-phosphorothioate
  modified_base 20: mod_base = OTHER; note = 2'-O-methyladenosine-3'-phosphorothioate
  modified_base 21: mod_base = OTHER; note = 2'-O-methyladenosine
atgaacactagcattccttaa

SEQ ID NO: 286 - RNA, 21 nt, synthetic construct
  source 1..21: mol_type = other RNA
  modified_base 1: mod_base = OTHER; note = 2'-O-methylcytidine-3'-phosphorothioate
  modified_base 2: mod_base = OTHER; note = 2'-O-methylcytidine-3'-phosphorothioate
  modified_base 3: mod_base = OTHER; note = 2'-O-methyluridine-3'-phosphate
  modified_base 4: mod_base = OTHER; note = 2'-O-methyluridine-3'-phosphate
  modified_base 5: mod_base = OTHER; note = 2'-O-methyladenosine-3'-phosphate
  modified_base 6: mod_base = OTHER; note = 2'-O-hexadecyl-uridine-3'-phosphate
  modified_base 7: mod_base = OTHER; note = 2'-deoxy-2'-fluorocytidine-3'-phosphate
  modified_base 8: mod_base = OTHER; note = 2'-O-methyladenosine-3'-phosphate
  modified_base 9: mod_base = OTHER; note = 2'-deoxy-2'-fluoroguanosine-3'-phosphate
  modified_base 10: mod_base = OTHER; note = 2'-deoxy-2'-fluorocytidine-3'-phosphate
  modified_base 11: mod_base = OTHER; note = 2'-deoxy-2'-fluoroadenosine-3'-phosphate
  modified_base 12: mod_base = OTHER; note = 2'-O-methylguanosine-3'-phosphate
  modified_base 13: mod_base = OTHER; note = 2'-O-methyladenosine-3'-phosphate
  modified_base 14: mod_base = OTHER; note = 2'-O-methyladenosine-3'-phosphate
  modified_base 15: mod_base = OTHER; note = 2'-O-methyluridine-3'-phosphate
  modified_base 16: mod_base = OTHER; note = 2'-O-methylcytidine-3'-phosphate
  modified_base 17: mod_base = OTHER; note = 2'-O-methylcytidine-3'-phosphate
  modified_base 18: mod_base = OTHER; note = 2'-O-methyluridine-3'-phosphate
  modified_base 19: mod_base = OTHER; note = 2'-O-methyluridine-3'-phosphorothioate
  modified_base 20: mod_base = OTHER; note = 2'-O-methyladenosine-3'-phosphorothioate
  modified_base 21: mod_base = OTHER; note = 2'-O-methyladenosine
ccttatcagcagaatccttaa

SEQ ID NO: 287 - RNA, 21 nt, synthetic construct
  source 1..21: mol_type = other RNA
  modified_base 1: mod_base = OTHER; note = 2'-O-methyladenosine-3'-phosphorothioate
  modified_base 2: mod_base = OTHER; note = 2'-O-methylguanosine-3'-phosphorothioate
  modified_base 3: mod_base = OTHER; note = 2'-O-methylcytidine-3'-phosphate
  modified_base 4: mod_base = OTHER; note = 2'-O-methyluridine-3'-phosphate
  modified_base 5: mod_base = OTHER; note = 2'-O-methylcytidine-3'-phosphate
  modified_base 6: mod_base = OTHER; note = 2'-O-hexadecyl-cytidine-3'-phosphate
  modified_base 7: mod_base = OTHER; note = 2'-deoxy-2'-fluoroadenosine-3'-phosphate
  modified_base 8: mod_base = OTHER; note = 2'-O-methyladenosine-3'-phosphate
  modified_base 9: mod_base = OTHER; note = 2'-deoxy-2'-fluorouridine-3'-phosphate
  modified_base 10: mod_base = OTHER; note = 2'-deoxy-2'-fluoroguanosine-3'-phosphate
  modified_base 11: mod_base = OTHER; note = 2'-deoxy-2'-fluorouridine-3'-phosphate
  modified_base 12: mod_base = OTHER; note = 2'-O-methylcytidine-3'-phosphate
  modified_base 13: mod_base = OTHER; note = 2'-O-methyladenosine-3'-phosphate
  modified_base 14: mod_base = OTHER; note = 2'-O-methyluridine-3'-phosphate
  modified_base 15: mod_base = OTHER; note = 2'-O-methylcytidine-3'-phosphate
  modified_base 16: mod_base = OTHER; note = 2'-O-methylcytidine-3'-phosphate
  modified_base 17: mod_base = OTHER; note = 2'-O-methyladenosine-3'-phosphate
  modified_base 18: mod_base = OTHER; note = 2'-O-methylguanosine-3'-phosphate
  modified_base 19: mod_base = OTHER; note = 2'-O-methyluridine-3'-phosphorothioate
  modified_base 20: mod_base = OTHER; note = 2'-O-methylguanosine-3'-phosphorothioate
  modified_base 21: mod_base = OTHER; note = 2'-O-methyladenosine
agctccaatgtcatccagtga

SEQ ID NO: 288 - RNA, 21 nt, synthetic construct
  source 1..21: mol_type = other RNA
  modified_base 1: mod_base = OTHER; note = 2'-O-methylcytidine-3'-phosphorothioate
  modified_base 2: mod_base = OTHER; note = 2'-O-methyladenosine-3'-phosphorothioate
  modified_base 3: mod_base = OTHER; note = 2'-O-methyladenosine-3'-phosphate
  modified_base 4: mod_base = OTHER; note = 2'-O-methylcytidine-3'-phosphate
  modified_base 5: mod_base = OTHER; note = 2'-O-methylcytidine-3'-phosphate
  modified_base 6: mod_base = OTHER; note = 2'-O-hexadecyl-adenosine-3'-phosphate
  modified_base 7: mod_base = OTHER; note = 2'-deoxy-2'-fluorocytidine-3'-phosphate
  modified_base 8: mod_base = OTHER; note = 2'-O-methyluridine-3'-phosphate
  modified_base 9: mod_base = OTHER; note = 2'-deoxy-2'-fluorouridine-3'-phosphate
  modified_base 10: mod_base = OTHER; note = 2'-deoxy-2'-fluorocytidine-3'-phosphate
  modified_base 11: mod_base = OTHER; note = 2'-deoxy-2'-fluorocytidine-3'-phosphate
  modified_base 12: mod_base = OTHER; note = 2'-O-methyladenosine-3'-phosphate
  modified_base 13: mod_base = OTHER; note = 2'-O-methylcytidine-3'-phosphate
  modified_base 14: mod_base = OTHER; note = 2'-O-methyladenosine-3'-phosphate
  modified_base 15: mod_base = OTHER; note = 2'-O-methyluridine-3'-phosphate
  modified_base 16: mod_base = OTHER; note = 2'-O-methylcytidine-3'-phosphate
  modified_base 17: mod_base = OTHER; note = 2'-O-methyladenosine-3'-phosphate
  modified_base 18: mod_base = OTHER; note = 2'-O-methylguanosine-3'-phosphate
  modified_base 19: mod_base = OTHER; note = 2'-O-methyladenosine-3'-phosphorothioate
  modified_base 20: mod_base = OTHER; note = 2'-O-methyluridine-3'-phosphorothioate
  modified_base 21: mod_base = OTHER; note = 2'-O-methyladenosine
caaccacttccacatcagata

SEQ ID NO: 289 - RNA, 21 nt, synthetic construct
  source 1..21: mol_type = other RNA
  modified_base 1: mod_base = OTHER; note = 2'-O-methyladenosine-3'-phosphorothioate
  modified_base 2: mod_base = OTHER; note = 2'-O-methyluridine-3'-phosphorothioate
  modified_base 3: mod_base = OTHER; note = 2'-O-methylguanosine-3'-phosphate
  modified_base 4: mod_base = OTHER; note = 2'-O-methylcytidine-3'-phosphate
  modified_base 5: mod_base = OTHER; note = 2'-O-methyluridine-3'-phosphate
  modified_base 6: mod_base = OTHER; note = 2'-O-hexadecyl-uridine-3'-phosphate
  modified_base 7: mod_base = OTHER; note = 2'-deoxy-2'-fluorocytidine-3'-phosphate
  modified_base 8: mod_base = OTHER; note = 2'-O-methyladenosine-3'-phosphate
  modified_base 9: mod_base = OTHER; note = 2'-deoxy-2'-fluorocytidine-3'-phosphate
  modified_base 10: mod_base = OTHER; note = 2'-deoxy-2'-fluorocytidine-3'-phosphate
  modified_base 11: mod_base = OTHER; note = 2'-deoxy-2'-fluorouridine-3'-phosphate
  modified_base 12: mod_base = OTHER; note = 2'-O-methylguanosine-3'-phosphate
  modified_base 13: mod_base = OTHER; note = 2'-O-methyluridine-3'-phosphate
  modified_base 14: mod_base = OTHER; note = 2'-O-methylcytidine-3'-phosphate
  modified_base 15: mod_base = OTHER; note = 2'-O-methyladenosine-3'-phosphate
  modified_base 16: mod_base = OTHER; note = 2'-O-methyladenosine-3'-phosphate
  modified_base 17: mod_base = OTHER; note = 2'-O-methylguanosine-3'-phosphate
  modified_base 18: mod_base = OTHER; note = 2'-O-methyluridine-3'-phosphate
  modified_base 19: mod_base = OTHER; note = 2'-O-methyladenosine-3'-phosphorothioate
  modified_base 20: mod_base = OTHER; note = 2'-O-methyluridine-3'-phosphorothioate
  modified_base 21: mod_base = OTHER; note = 2'-O-methyladenosine
atgcttcacctgtcaagtata

SEQ ID NO: 290 - RNA, 21 nt, synthetic construct
  source 1..21: mol_type = other RNA
  modified_base 1: mod_base = OTHER; note = 2'-O-methyladenosine-3'-phosphorothioate
  modified_base 2: mod_base = OTHER; note = 2'-O-methylguanosine-3'-phosphorothioate
  modified_base 3: mod_base = OTHER; note = 2'-O-methylguanosine-3'-phosphate
  modified_base 4: mod_base = OTHER; note = 2'-O-methylcytidine-3'-phosphate
  modified_base 5: mod_base = OTHER; note = 2'-O-methyluridine-3'-phosphate
  modified_base 6: mod_base = OTHER; note = 2'-O-hexadecyl-uridine-3'-phosphate
  modified_base 7: mod_base = OTHER; note = 2'-deoxy-2'-fluorocytidine-3'-phosphate
  modified_base 8: mod_base = OTHER; note = 2'-O-methyluridine-3'-phosphate
  modified_base 9: mod_base = OTHER; note = 2'-deoxy-2'-fluorouridine-3'-phosphate
  modified_base 10: mod_base = OTHER; note = 2'-deoxy-2'-fluorocytidine-3'-phosphate
  modified_base 11: mod_base = OTHER; note = 2'-deoxy-2'-fluorouridine-3'-phosphate
  modified_base 12: mod_base = OTHER; note = 2'-O-methyluridine-3'-phosphate
  modified_base 13: mod_base = OTHER; note = 2'-O-methylcytidine-3'-phosphate
  modified_base 14: mod_base = OTHER; note = 2'-O-methyladenosine-3'-phosphate
  modified_base 15: mod_base = OTHER; note = 2'-O-methyladenosine-3'-phosphate
  modified_base 16: mod_base = OTHER; note = 2'-O-methylguanosine-3'-phosphate
  modified_base 17: mod_base = OTHER; note = 2'-O-methyladenosine-3'-phosphate
  modified_base 18: mod_base = OTHER; note = 2'-O-methyladenosine-3'-phosphate
  modified_base 19: mod_base = OTHER; note = 2'-O-methylcytidine-3'-phosphorothioate
  modified_base 20: mod_base = OTHER; note = 2'-O-methylcytidine-3'-phosphorothioate
  modified_base 21: mod_base = OTHER; note = 2'-O-methyladenosine
aggcttcttcttcaagaacca

SEQ ID NO: 291 - RNA, 21 nt, synthetic construct
  source 1..21: mol_type = other RNA
  modified_base 1: mod_base = OTHER; note = 2'-O-methyladenosine-3'-phosphorothioate
  modified_base 2: mod_base = OTHER; note = 2'-O-methyladenosine-3'-phosphorothioate
  modified_base 3: mod_base = OTHER; note = 2'-O-methylcytidine-3'-phosphate
  modified_base 4: mod_base = OTHER; note = 2'-O-methylcytidine-3'-phosphate
  modified_base 5: mod_base = OTHER; note = 2'-O-methyladenosine-3'-phosphate
  modified_base 6: mod_base = OTHER; note = 2'-O-hexadecyl-guanosine-3'-phosphate
  modified_base 7: mod_base = OTHER; note = 2'-deoxy-2'-fluoroguanosine-3'-phosphate
  modified_base 8: mod_base = OTHER; note = 2'-O-methyladenosine-3'-phosphate
  modified_base 9: mod_base = OTHER; note = 2'-deoxy-2'-fluoroguanosine-3'-phosphate
  modified_base 10: mod_base = OTHER; note = 2'-deoxy-2'-fluorouridine-3'-phosphate
  modified_base 11: mod_base = OTHER; note = 2'-deoxy-2'-fluoroadenosine-3'-phosphate
  modified_base 12: mod_base = OTHER; note = 2'-O-methylcytidine-3'-phosphate
  modified_base 13: mod_base = OTHER; note = 2'-O-methyladenosine-3'-phosphate
  modified_base 14: mod_base = OTHER; note = 2'-O-methyluridine-3'-phosphate
  modified_base 15: mod_base = OTHER; note = 2'-O-methylcytidine-3'-phosphate
  modified_base 16: mod_base = OTHER; note = 2'-O-methyluridine-3'-phosphate
  modified_base 17: mod_base = OTHER; note = 2'-O-methylguanosine-3'-phosphate
  modified_base 18: mod_base = OTHER; note = 2'-O-methylcytidine-3'-phosphate
  modified_base 19: mod_base = OTHER; note = 2'-O-methyladenosine-3'-phosphorothioate
  modified_base 20: mod_base = OTHER; note = 2'-O-methylcytidine-3'-phosphorothioate
  modified_base 21: mod_base = OTHER; note = 2'-O-methyladenosine
aaccaggagtacatctgcaca

SEQ ID NO: 292 - RNA, 21 nt, synthetic construct
  source 1..21: mol_type = other RNA
  modified_base 1: mod_base = OTHER; note = 2'-O-methylguanosine-3'-phosphorothioate
  modified_base 2: mod_base = OTHER; note = 2'-O-methyladenosine-3'-phosphorothioate
  modified_base 3: mod_base = OTHER; note = 2'-O-methylcytidine-3'-phosphate
  modified_base 4: mod_base = OTHER; note = 2'-O-methyluridine-3'-phosphate
  modified_base 5: mod_base = OTHER; note = 2'-O-methyladenosine-3'-phosphate
  modified_base 6: mod_base = OTHER; note = 2'-O-hexadecyl-cytidine-3'-phosphate
  modified_base 7: mod_base = OTHER; note = 2'-deoxy-2'-fluorocytidine-3'-phosphate
  modified_base 8: mod_base = OTHER; note = 2'-O-methyladenosine-3'-phosphate
  modified_base 9: mod_base = OTHER; note = 2'-deoxy-2'-fluoroguanosine-3'-phosphate
  modified_base 10: mod_base = OTHER; note = 2'-deoxy-2'-fluorocytidine-3'-phosphate
  modified_base 11: mod_base = OTHER; note = 2'-deoxy-2'-fluoroadenosine-3'-phosphate
  modified_base 12: mod_base = OTHER; note = 2'-O-methyladenosine-3'-phosphate
  modified_base 13: mod_base = OTHER; note = 2'-O-methylcytidine-3'-phosphate
  modified_base 14: mod_base = OTHER; note = 2'-O-methyluridine-3'-phosphate
  modified_base 15: mod_base = OTHER; note = 2'-O-methylcytidine-3'-phosphate
  modified_base 16: mod_base = OTHER; note = 2'-O-methyluridine-3'-phosphate
  modified_base 17: mod_base = OTHER; note = 2'-O-methyladenosine-3'-phosphate
  modified_base 18: mod_base = OTHER; note = 2'-O-methyluridine-3'-phosphate
  modified_base 19: mod_base = OTHER; note = 2'-O-methylguanosine-3'-phosphorothioate
  modified_base 20: mod_base = OTHER; note = 2'-O-methylguanosine-3'-phosphorothioate
  modified_base 21: mod_base = OTHER; note = 2'-O-methyladenosine
gactaccagcaactctatgga

SEQ ID NO: 293 - RNA, 21 nt, synthetic construct
  source 1..21: mol_type = other RNA
  modified_base 1: mod_base = OTHER; note = 2'-O-methylguanosine-3'-phosphorothioate
  modified_base 2: mod_base = OTHER; note = 2'-O-methylguanosine-3'-phosphorothioate
  modified_base 3: mod_base = OTHER; note = 2'-O-methylguanosine-3'-phosphate
  modified_base 4: mod_base = OTHER; note = 2'-O-methyladenosine-3'-phosphate
  modified_base 5: mod_base = OTHER; note = 2'-O-methylcytidine-3'-phosphate
  modified_base 6: mod_base = OTHER; note = 2'-O-hexadecyl-uridine-3'-phosphate
  modified_base 7: mod_base = OTHER; note = 2'-deoxy-2'-fluorouridine-3'-phosphate
  modified_base 8: mod_base = OTHER; note = 2'-O-methylcytidine-3'-phosphate
  modified_base 9: mod_base = OTHER; note = 2'-deoxy-2'-fluoroadenosine-3'-phosphate
  modified_base 10: mod_base = OTHER; note = 2'-deoxy-2'-fluorouridine-3'-phosphate
  modified_base 11: mod_base = OTHER; note = 2'-deoxy-2'-fluorocytidine-3'-phosphate
  modified_base 12: mod_base = OTHER; note = 2'-O-methyladenosine-3'-phosphate
  modified_base 13: mod_base = OTHER; note = 2'-O-methylcytidine-3'-phosphate
  modified_base 14: mod_base = OTHER; note = 2'-O-methyladenosine-3'-phosphate
  modified_base 15: mod_base = OTHER; note = 2'-O-methylguanosine-3'-phosphate
  modified_base 16: mod_base = OTHER; note = 2'-O-methylguanosine-3'-phosphate
  modified_base 17: mod_base = OTHER; note = 2'-O-methylcytidine-3'-phosphate
  modified_base 18: mod_base = OTHER; note = 2'-O-methylguanosine-3'-phosphate
  modified_base 19: mod_base = OTHER; note = 2'-O-methyladenosine-3'-phosphorothioate
  modified_base 20: mod_base = OTHER; note = 2'-O-methyladenosine-3'-phosphorothioate
  modified_base 21: mod_base = OTHER; note = 2'-O-methyladenosine
gggacttcatcacaggcgaaa

SEQ ID NO: 294 - RNA, 21 nt, synthetic construct
  source 1..21: mol_type = other RNA
  modified_base 1: mod_base = OTHER; note = 2'-O-methylcytidine-3'-phosphorothioate
  modified_base 2: mod_base = OTHER; note = 2'-O-methyladenosine-3'-phosphorothioate
  modified_base 3: mod_base = OTHER; note = 2'-O-methyladenosine-3'-phosphate
  modified_base 4: mod_base = OTHER; note = 2'-O-methylguanosine-3'-phosphate
  modified_base 5: mod_base = OTHER; note = 2'-O-methyluridine-3'-phosphate
  modified_base 6: mod_base = OTHER; note = 2'-O-hexadecyl-guanosine-3'-phosphate
  modified_base 7: mod_base = OTHER; note = 2'-deoxy-2'-fluorocytidine-3'-phosphate
  modified_base 8: mod_base = OTHER; note = 2'-O-methyluridine-3'-phosphate
  modified_base 9: mod_base = OTHER; note = 2'-deoxy-2'-fluorouridine-3'-phosphate
  modified_base 10: mod_base = OTHER; note = 2'-deoxy-2'-fluorocytidine-3'-phosphate
  modified_base 11: mod_base = OTHER; note = 2'-deoxy-2'-fluoroguanosine-3'-phosphate
  modified_base 12: mod_base = OTHER; note = 2'-O-methyluridine-3'-phosphate
  modified_base 13: mod_base = OTHER; note = 2'-O-methylguanosine-3'-phosphate
  modified_base 14: mod_base = OTHER; note = 2'-O-methyluridine-3'-phosphate
  modified_base 15: mod_base = OTHER; note = 2'-O-methylguanosine-3'-phosphate
  modified_base 16: mod_base = OTHER; note = 2'-O-methylcytidine-3'-phosphate
  modified_base 17: mod_base = OTHER; note = 2'-O-methyladenosine-3'-phosphate
  modified_base 18: mod_base = OTHER; note = 2'-O-methylguanosine-3'-phosphate
  modified_base 19: mod_base = OTHER; note = 2'-O-methylcytidine-3'-phosphorothioate
  modified_base 20: mod_base = OTHER; note = 2'-O-methyluridine-3'-phosphorothioate
  modified_base 21: mod_base = OTHER; note = 2'-O-methyladenosine
caagtgcttcgtgtgcagcta

SEQ ID NO: 295 - RNA, 21 nt, synthetic construct
  source 1..21: mol_type = other RNA
  modified_base 1: mod_base = OTHER; note = 2'-O-methylcytidine-3'-phosphorothioate
  modified_base 2: mod_base = OTHER; note = 2'-O-methyluridine-3'-phosphorothioate
  modified_base 3: mod_base = OTHER; note = 2'-O-methyluridine-3'-phosphate
  modified_base 4: mod_base = OTHER; note = 2'-O-methylguanosine-3'-phosphate
  modified_base 5: mod_base = OTHER; note = 2'-O-methyluridine-3'-phosphate
  modified_base 6: mod_base = OTHER; note = 2'-O-hexadecyl-guanosine-3'-phosphate
  modified_base 7: mod_base = OTHER; note = 2'-deoxy-2'-fluorocytidine-3'-phosphate
  modified_base 8: mod_base = OTHER; note = 2'-O-methyladenosine-3'-phosphate
  modified_base 9: mod_base = OTHER; note = 2'-deoxy-2'-fluoroguanosine-3'-phosphate
  modified_base 10: mod_base = OTHER; note = 2'-deoxy-2'-fluoroguanosine-3'-phosphate
  modified_base 11: mod_base = OTHER; note = 2'-deoxy-2'-fluoroadenosine-3'-phosphate
  modified_base 12: mod_base = OTHER; note = 2'-O-methyladenosine-3'-phosphate
  modified_base 13: mod_base = OTHER; note = 2'-O-methylguanosine-3'-phosphate
  modified_base 14: mod_base = OTHER; note = 2'-O-methylcytidine-3'-phosphate
  modified_base 15: mod_base = OTHER; note = 2'-O-methylcytidine-3'-phosphate
  modified_base 16: mod_base = OTHER; note = 2'-O-methyluridine-3'-phosphate
  modified_base 17: mod_base = OTHER; note = 2'-O-methyluridine-3'-phosphate
  modified_base 18: mod_base = OTHER; note = 2'-O-methyluridine-3'-phosphate
  modified_base 19: mod_base = OTHER; note = 2'-O-methylcytidine-3'-phosphorothioate
  modified_base 20: mod_base = OTHER; note = 2'-O-methylcytidine-3'-phosphorothioate
  modified_base 21: mod_base = OTHER; note = 2'-O-methyladenosine
cttgtgcaggaagcctttcca

SEQ ID NO: 296 - RNA, 21 nt, synthetic construct
  source 1..21: mol_type = other RNA
  modified_base 1: mod_base = OTHER; note = 2'-O-methylcytidine-3'-phosphorothioate
  modified_base 2: mod_base = OTHER; note = 2'-O-methyladenosine-3'-phosphorothioate
  modified_base 3: mod_base = OTHER; note = 2'-O-methyluridine-3'-phosphate
  modified_base 4: mod_base = OTHER; note = 2'-O-methyluridine-3'-phosphate
  modified_base 5: mod_base = OTHER; note = 2'-O-methylguanosine-3'-phosphate
  modified_base 6: mod_base = OTHER; note = 2'-O-hexadecyl-guanosine-3'-phosphate
  modified_base 7: mod_base = OTHER; note = 2'-deoxy-2'-fluoroadenosine-3'-phosphate
  modified_base 8: mod_base = OTHER; note = 2'-O-methylguanosine-3'-phosphate
  modified_base 9: mod_base = OTHER; note = 2'-deoxy-2'-fluoroadenosine-3'-phosphate
  modified_base 10: mod_base = OTHER; note = 2'-deoxy-2'-fluorocytidine-3'-phosphate
  modified_base 11: mod_base = OTHER; note = 2'-deoxy-2'-fluoroadenosine-3'-phosphate
  modified_base 12: mod_base = OTHER; note = 2'-O-methyladenosine-3'-phosphate
  modified_base 13: mod_base = OTHER; note = 2'-O-methylguanosine-3'-phosphate
  modified_base 14: mod_base = OTHER; note = 2'-O-methylguanosine-3'-phosphate
  modified_base 15: mod_base = OTHER; note = 2'-O-methyluridine-3'-phosphate
  modified_base 16: mod_base = OTHER; note = 2'-O-methylguanosine-3'-phosphate
  modified_base 17: mod_base = OTHER; note = 2'-O-methyladenosine-3'-phosphate
  modified_base 18: mod_base = OTHER; note = 2'-O-methylcytidine-3'-phosphate
  modified_base 19: mod_base = OTHER; note = 2'-O-methylcytidine-3'-phosphorothioate
  modified_base 20: mod_base = OTHER; note = 2'-O-methyluridine-3'-phosphorothioate
  modified_base 21: mod_base = OTHER; note = 2'-O-methyladenosine
cattggagacaaggtgaccta

SEQ ID NO: 297 - RNA, 21 nt, synthetic construct
  source 1..21: mol_type = other RNA
  modified_base 1: mod_base = OTHER; note = 2'-O-methylguanosine-3'-phosphorothioate
  modified_base 2: mod_base = OTHER; note = 2'-O-methyladenosine-3'-phosphorothioate
  modified_base 3: mod_base = OTHER; note = 2'-O-methylcytidine-3'-phosphate
  modified_base 4: mod_base = OTHER; note = 2'-O-methylcytidine-3'-phosphate
  modified_base 5: mod_base = OTHER; note = 2'-O-methyluridine-3'-phosphate
  modified_base 6: mod_base = OTHER; note = 2'-O-hexadecyl-uridine-3'-phosphate
  modified_base 7: mod_base = OTHER; note = 2'-deoxy-2'-fluorocytidine-3'-phosphate
  modified_base 8: mod_base = OTHER; note = 2'-O-methyladenosine-3'-phosphate
  modified_base 9: mod_base = OTHER; note = 2'-deoxy-2'-fluoroguanosine-3'-phosphate
  modified_base 10: mod_base = OTHER; note = 2'-deoxy-2'-fluorocytidine-3'-phosphate
  modified_base 11: mod_base = OTHER; note = 2'-deoxy-2'-fluoroguanosine-3'-phosphate
  modified_base 12: mod_base = OTHER; note = 2'-O-methylguanosine-3'-phosphate
  modified_base 13: mod_base = OTHER; note = 2'-O-methyluridine-3'-phosphate
  modified_base 14: mod_base = OTHER; note = 2'-O-methyladenosine-3'-phosphate
  modified_base 15: mod_base = OTHER; note = 2'-O-methyladenosine-3'-phosphate
  modified_base 16: mod_base = OTHER; note = 2'-O-methyladenosine-3'-phosphate
  modified_base 17: mod_base = OTHER; note = 2'-O-methylguanosine-3'-phosphate
  modified_base 18: mod_base = OTHER; note = 2'-O-methyladenosine-3'-phosphate
  modified_base 19: mod_base = OTHER; note = 2'-O-methyladenosine-3'-phosphorothioate
  modified_base 20: mod_base = OTHER; note = 2'-O-methyluridine-3'-phosphorothioate
  modified_base 21: mod_base = OTHER; note = 2'-O-methyladenosine
gaccttcagcggtaaagaata

SEQ ID NO: 298 - RNA, 21 nt, synthetic construct
  source 1..21: mol_type = other RNA
  modified_base 1: mod_base = OTHER; note = 2'-O-methyladenosine-3'-phosphorothioate
  modified_base 2: mod_base = OTHER; note = 2'-O-methylguanosine-3'-phosphorothioate
  modified_base 3: mod_base = OTHER; note = 2'-O-methyladenosine-3'-phosphate
  modified_base 4: mod_base = OTHER; note = 2'-O-methyladenosine-3'-phosphate
  modified_base 5: mod_base = OTHER; note = 2'-O-methyluridine-3'-phosphate
  modified_base 6: mod_base = OTHER; note = 2'-O-hexadecyl-guanosine-3'-phosphate
  modified_base 7: mod_base = OTHER; note = 2'-deoxy-2'-fluorouridine-3'-phosphate
  modified_base 8: mod_base = OTHER; note = 2'-O-methylguanosine-3'-phosphate
  modified_base 9: mod_base = OTHER; note = 2'-deoxy-2'-fluorouridine-3'-phosphate
  modified_base 10: mod_base = OTHER; note = 2'-deoxy-2'-fluoroguanosine-3'-phosphate
  modified_base 11: mod_base = OTHER; note = 2'-deoxy-2'-fluorouridine-3'-phosphate
  modified_base 12: mod_base = OTHER; note = 2'-O-methylguanosine-3'-phosphate
  modified_base 13: mod_base = OTHER; note = 2'-O-methylcytidine-3'-phosphate
  modified_base 14: mod_base = OTHER; note = 2'-O-methylcytidine-3'-phosphate
  modified_base 15: mod_base = OTHER; note = 2'-O-methyladenosine-3'-phosphate
  modified_base 16: mod_base = OTHER; note = 2'-O-methyladenosine-3'-phosphate
  modified_base 17: mod_base = OTHER; note = 2'-O-methyladenosine-3'-phosphate
  modified_base 18: mod_base = OTHER; note = 2'-O-methylcytidine-3'-phosphate
  modified_base 19: mod_base = OTHER; note = 2'-O-methylguanosine-3'-phosphorothioate
  modified_base 20: mod_base = OTHER; note = 2'-O-methyluridine-3'-phosphorothioate
  modified_base 21: mod_base = OTHER; note = 2'-O-methyladenosine
agaatgtgtgtgccaaacgta

SEQ ID NO: 299 - RNA, 21 nt, synthetic construct
  source 1..21: mol_type = other RNA
  modified_base 1: mod_base = OTHER; note = 2'-O-methylcytidine-3'-phosphorothioate
  modified_base 2: mod_base = OTHER; note = 2'-O-methyladenosine-3'-phosphorothioate
  modified_base 3: mod_base = OTHER; note = 2'-O-methylguanosine-3'-phosphate
  modified_base 4: mod_base = OTHER; note = 2'-O-methylcytidine-3'-phosphate
  modified_base 5: mod_base = OTHER; note = 2'-O-methyladenosine-3'-phosphate
  modified_base 6: mod_base = OTHER; note = 2'-O-hexadecyl-guanosine-3'-phosphate
  modified_base 7: mod_base = OTHER; note = 2'-deoxy-2'-fluorouridine-3'-phosphate
  modified_base 8: mod_base = OTHER; note = 2'-O-methyladenosine-3'-phosphate
  modified_base 9: mod_base = OTHER; note = 2'-deoxy-2'-fluoroadenosine-3'-phosphate
  modified_base 10: mod_base = OTHER; note = 2'-deoxy-2'-fluoroguanosine-3'-phosphate
  modified_base 11: mod_base = OTHER; note = 2'-deoxy-2'-fluorocytidine-3'-phosphate
  modified_base 12: mod_base = OTHER; note = 2'-O-methylcytidine-3'-phosphate
  modified_base 13: mod_base = OTHER; note = 2'-O-methylcytidine-3'-phosphate
  modified_base 14: mod_base = OTHER; note = 2'-O-methyladenosine-3'-phosphate
  modified_base 15: mod_base = OTHER; note = 2'-O-methyluridine-3'-phosphate
  modified_base 16: mod_base = OTHER; note = 2'-O-methylcytidine-3'-phosphate
  modified_base 17: mod_base = OTHER; note = 2'-O-methyladenosine-3'-phosphate
  modified_base 18: mod_base = OTHER; note = 2'-O-methyladenosine-3'-phosphate
  modified_base 19: mod_base = OTHER; note = 2'-O-methylguanosine-3'-phosphorothioate
  modified_base 20: mod_base = OTHER; note = 2'-O-methyladenosine-3'-phosphorothioate
  modified_base 21: mod_base = OTHER; note = 2'-O-methyladenosine
cagcagtaagcccatcaagaa

SEQ ID NO: 300 - RNA, 21 nt, synthetic construct
  source 1..21: mol_type = other RNA
  modified_base 1: mod_base = OTHER; note = 2'-O-methylcytidine-3'-phosphorothioate
  modified_base 2: mod_base = OTHER; note = 2'-O-methyluridine-3'-phosphorothioate
  modified_base 3: mod_base = OTHER; note = 2'-O-methylguanosine-3'-phosphate
  modified_base 4: mod_base = OTHER; note = 2'-O-methylcytidine-3'-phosphate
  modified_base 5: mod_base = OTHER; note = 2'-O-methyluridine-3'-phosphate
  modified_base 6: mod_base = OTHER; note = 2'-O-hexadecyl-uridine-3'-phosphate
  modified_base 7: mod_base = OTHER; note = 2'-deoxy-2'-fluorocytidine-3'-phosphate
  modified_base 8: mod_base = OTHER; note = 2'-O-methyladenosine-3'-phosphate
  modified_base 9: mod_base = OTHER; note = 2'-deoxy-2'-fluoroadenosine-3'-phosphate
  modified_base 10: mod_base = OTHER; note = 2'-deoxy-2'-fluoroguanosine-3'-phosphate
  modified_base 11: mod_base = OTHER; note = 2'-deoxy-2'-fluorouridine-3'-phosphate
  modified_base 12: mod_base = OTHER; note = 2'-O-methylguanosine-3'-phosphate
  modified_base 13: mod_base = OTHER; note = 2'-O-methylcytidine-3'-phosphate
  modified_base 14: mod_base = OTHER; note = 2'-O-methylcytidine-3'-phosphate
  modified_base 15: mod_base = OTHER; note = 2'-O-methyladenosine-3'-phosphate
  modified_base 16: mod_base = OTHER; note = 2'-O-methylguanosine-3'-phosphate
  modified_base 17: mod_base = OTHER; note = 2'-O-methyladenosine-3'-phosphate
  modified_base 18: mod_base = OTHER; note = 2'-O-methylcytidine-3'-phosphate
  modified_base 19: mod_base = OTHER; note = 2'-O-methylcytidine-3'-phosphorothioate
  modified_base 20: mod_base = OTHER; note = 2'-O-methyluridine-3'-phosphorothioate
  modified_base 21: mod_base = OTHER; note = 2'-O-methyladenosine
ctgcttcaagtgccagaccta

SEQ ID NO: 301 - RNA, 21 nt, synthetic construct
  source 1..21: mol_type = other RNA
  modified_base 1: mod_base = OTHER; note = 2'-O-methylguanosine-3'-phosphorothioate
  modified_base 2: mod_base = OTHER; note = 2'-O-methyladenosine-3'-phosphorothioate
  modified_base 3: mod_base = OTHER; note = 2'-O-methyluridine-3'-phosphate
  modified_base 4: mod_base = OTHER; note = 2'-O-methylguanosine-3'-phosphate
  modified_base 5: mod_base = OTHER; note = 2'-O-methylguanosine-3'-phosphate
  modified_base 6: mod_base = OTHER; note = 2'-O-hexadecyl-uridine-3'-phosphate
  modified_base 7: mod_base = OTHER; note = 2'-deoxy-2'-fluoroguanosine-3'-phosphate
  modified_base 8: mod_base = OTHER; note = 2'-O-methyluridine-3'-phosphate
  modified_base 9: mod_base = OTHER; note = 2'-deoxy-2'-fluorouridine-3'-phosphate
  modified_base 10: mod_base = OTHER; note = 2'-deoxy-2'-fluorocytidine-3'-phosphate
  modified_base 11: mod_base = OTHER; note = 2'-deoxy-2'-fluorocytidine-3'-phosphate
  modified_base 12: mod_base = OTHER; note = 2'-O-methyladenosine-3'-phosphate
  modified_base 13: mod_base = OTHER; note = 2'-O-methyluridine-3'-phosphate
  modified_base 14: mod_base = OTHER; note = 2'-O-methyladenosine-3'-phosphate
  modified_base 15: mod_base = OTHER; note = 2'-O-methylcytidine-3'-phosphate
  modified_base 16: mod_base = OTHER; note = 2'-O-methyluridine-3'-phosphate
  modified_base 17: mod_base = OTHER; note = 2'-O-methylguanosine-3'-phosphate
  modified_base 18: mod_base = OTHER; note = 2'-O-methyluridine-3'-phosphate
  modified_base 19: mod_base = OTHER; note = 2'-O-methylguanosine-3'-phosphorothioate
  modified_base 20: mod_base = OTHER; note = 2'-O-methyladenosine-3'-phosphorothioate
  modified_base 21: mod_base = OTHER; note = 2'-O-methyladenosine
gatggtgttccatactgtgaa

SEQ ID NO: 302 - RNA, 21 nt, synthetic construct
  source 1..21: mol_type = other RNA
  modified_base 1: mod_base = OTHER; note = 2'-O-methyluridine-3'-phosphorothioate
  modified_base 2: mod_base = OTHER; note = 2'-O-methylguanosine-3'-phosphorothioate
  modified_base 3: mod_base = OTHER; note = 2'-O-methylguanosine-3'-phosphate
  modified_base 4: mod_base = OTHER; note = 2'-O-methylcytidine-3'-phosphate
  modified_base 5: mod_base = OTHER; note = 2'-O-methyladenosine-3'-phosphate
  modified_base 6: mod_base = OTHER; note = 2'-O-hexadecyl-uridine-3'-phosphate
  modified_base 7: mod_base = OTHER; note = 2'-deoxy-2'-fluorouridine-3'-phosphate
  modified_base 8: mod_base = OTHER; note = 2'-O-methyladenosine-3'-phosphate
  modified_base 9: mod_base = OTHER; note = 2'-deoxy-2'-fluoroadenosine-3'-phosphate
  modified_base 10: mod_base = OTHER; note = 2'-deoxy-2'-fluoroadenosine-3'-phosphate
  modified_base 11: mod_base = OTHER; note = 2'-deoxy-2'-fluorouridine-3'-phosphate
  modified_base 12: mod_base = OTHER; note = 2'-O-methylguanosine-3'-phosphate
  modified_base 13: mod_base = OTHER; note = 2'-O-methyluridine-3'-phosphate
  modified_base 14: mod_base = OTHER; note = 2'-O-methylguanosine-3'-phosphate
  modified_base 15: mod_base = OTHER; note = 2'-O-methyladenosine-3'-phosphate
  modified_base 16: mod_base = OTHER; note = 2'-O-methylguanosine-3'-phosphate
  modified_base 17: mod_base = OTHER; note = 2'-O-methyladenosine-3'-phosphate
  modified_base 18: mod_base = OTHER; note = 2'-O-methylcytidine-3'-phosphate
  modified_base 19: mod_base = OTHER; note = 2'-O-methyluridine-3'-phosphorothioate
  modified_base 20: mod_base = OTHER; note = 2'-O-methyluridine-3'-phosphorothioate
  modified_base 21: mod_base = OTHER; note = 2'-O-methyladenosine
tggcattaaatgtgagactta

SEQ ID NO: 303 - RNA, 21 nt, synthetic construct
  source 1..21: mol_type = other RNA
  modified_base 1: mod_base = OTHER; note = 2'-O-methyluridine-3'-phosphorothioate
  modified_base 2: mod_base = OTHER; note = 2'-O-methyluridine-3'-phosphorothioate
  modified_base 3: mod_base = OTHER; note = 2'-O-methylguanosine-3'-phosphate
  modified_base 4: mod_base = OTHER; note = 2'-O-methyluridine-3'-phosphate
  modified_base 5: mod_base = OTHER; note = 2'-O-methylguanosine-3'-phosphate
  modified_base 6: mod_base = OTHER; note = 2'-O-hexadecyl-adenosine-3'-phosphate
  modified_base 7: mod_base = OTHER; note = 2'-deoxy-2'-fluorocytidine-3'-phosphate
  modified_base 8: mod_base = OTHER; note = 2'-O-methylcytidine-3'-phosphate
  modified_base 9: mod_base = OTHER; note = 2'-deoxy-2'-fluoroguanosine-3'-phosphate
  modified_base 10: mod_base = OTHER; note = 2'-deoxy-2'-fluoroadenosine-3'-phosphate
  modified_base 11: mod_base = OTHER; note = 2'-deoxy-2'-fluorouridine-3'-phosphate
  modified_base 12: mod_base = OTHER; note = 2'-O-methyladenosine-3'-phosphate
  modified_base 13: mod_base = OTHER; note = 2'-O-methylcytidine-3'-phosphate
  modified_base 14: mod_base = OTHER; note = 2'-O-methyladenosine-3'-phosphate
  modified_base 15: mod_base = OTHER; note = 2'-O-methyluridine-3'-phosphate
  modified_base 16: mod_base = OTHER; note = 2'-O-methylcytidine-3'-phosphate
  modified_base 17: mod_base = OTHER; note = 2'-O-methyladenosine-3'-phosphate
  modified_base 18: mod_base = OTHER; note = 2'-O-methylguanosine-3'-phosphate
  modified_base 19: mod_base = OTHER; note = 2'-O-methyluridine-3'-phosphorothioate
  modified_base 20: mod_base = OTHER; note = 2'-O-methylguanosine-3'-phosphorothioate
  modified_base 21: mod_base = OTHER; note = 2'-O-methyladenosine
ttgtgaccgatacatcagtga

SEQ ID NO: 304 - RNA, 21 nt, synthetic construct
  source 1..21: mol_type = other RNA
  modified_base 1: mod_base = OTHER; note = 2'-O-methylcytidine-3'-phosphorothioate
  modified_base 2: mod_base = OTHER; note = 2'-O-methylcytidine-3'-phosphorothioate
  modified_base 3: mod_base = OTHER; note = 2'-O-methyladenosine-3'-phosphate
  modified_base 4: mod_base = OTHER; note = 2'-O-methylcytidine-3'-phosphate
  modified_base 5: mod_base = OTHER; note = 2'-O-methylcytidine-3'-phosphate
  modified_base 6: mod_base = OTHER; note = 2'-O-hexadecyl-adenosine-3'-phosphate
  modified_base 7: mod_base = OTHER; note = 2'-deoxy-2'-fluoroguanosine-3'-phosphate
  modified_base 8: mod_base = OTHER; note = 2'-O-methyladenosine-3'-phosphate
  modified_base 9: mod_base = OTHER; note = 2'-deoxy-2'-fluorouridine-3'-phosphate
  modified_base 10: mod_base = OTHER; note = 2'-deoxy-2'-fluoroguanosine-3'-phosphate
  modified_base 11: mod_base = OTHER; note = 2'-deoxy-2'-fluorouridine-3'-phosphate
  modified_base 12: mod_base = OTHER; note = 2'-O-methyluridine-3'-phosphate
  modified_base 13: mod_base = OTHER; note = 2'-O-methylcytidine-3'-phosphate
  modified_base 14: mod_base = OTHER; note = 2'-O-methyladenosine-3'-phosphate
  modified_base 15: mod_base = OTHER; note = 2'-O-methylcytidine-3'-phosphate
  modified_base 16: mod_base = OTHER; note = 2'-O-methylcytidine-3'-phosphate
  modified_base 17: mod_base = OTHER; note = 2'-O-methylguanosine-3'-phosphate
  modified_base 18: mod_base = OTHER; note = 2'-O-methyladenosine-3'-phosphate
  modified_base 19: mod_base = OTHER; note = 2'-O-methyladenosine-3'-phosphorothioate
  modified_base 20: mod_base = OTHER; note = 2'-O-methylguanosine-3'-phosphorothioate
  modified_base 21: mod_base = OTHER; note = 2'-O-methyladenosine
ccaccagatgttcaccgaaga

SEQ ID NO: 305 - RNA, 21 nt, synthetic construct
  source 1..21: mol_type = other RNA
  modified_base 1: mod_base = OTHER; note = 2'-O-methylguanosine-3'-phosphorothioate
  modified_base 2: mod_base = OTHER; note = 2'-O-methyladenosine-3'-phosphorothioate
  modified_base 3: mod_base = OTHER; note = 2'-O-methylguanosine-3'-phosphate
  modified_base 4: mod_base = OTHER; note = 2'-O-methyladenosine-3'-phosphate
  modified_base 5: mod_base = OTHER; note = 2'-O-methylguanosine-3'-phosphate
  modified_base 6: mod_base = OTHER; note = 2'-O-hexadecyl-guanosine-3'-phosphate
  modified_base 7: mod_base = OTHER; note = 2'-deoxy-2'-fluoroadenosine-3'-phosphate
  modified_base 8: mod_base = OTHER; note = 2'-O-methyladenosine-3'-phosphate
  modified_base 9: mod_base = OTHER; note = 2'-deoxy-2'-fluoroadenosine-3'-phosphate
  modified_base 10: mod_base = OTHER; note = 2'-deoxy-2'-fluorouridine-3'-phosphate
  modified_base 11: mod_base = OTHER; note = 2'-deoxy-2'-fluoroguanosine-3'-phosphate
  modified_base 12: mod_base = OTHER; note = 2'-O-methyluridine-3'-phosphate
  modified_base 13: mod_base = OTHER; note = 2'-O-methyladenosine-3'-phosphate
  modified_base 14: mod_base = OTHER; note = 2'-O-methylcytidine-3'-phosphate
  modified_base 15: mod_base = OTHER; note = 2'-O-methylcytidine-3'-phosphate
  modified_base 16: mod_base = OTHER; note = 2'-O-methyluridine-3'-phosphate
  modified_base 17: mod_base = OTHER; note = 2'-O-methylcytidine-3'-phosphate
  modified_base 18: mod_base = OTHER; note = 2'-O-methyladenosine-3'-phosphate
  modified_base 19: mod_base = OTHER; note = 2'-O-methylcytidine-3'-phosphorothioate
  modified_base 20: mod_base = OTHER; note = 2'-O-methyladenosine-3'-phosphorothioate
  modified_base 21: mod_base = OTHER; note = 2'-O-methyladenosine
gagaggaaatgtacctcacaa

SEQ ID NO: 306 - RNA, 21 nt, synthetic construct
  source 1..21: mol_type = other RNA
  modified_base 1: mod_base = OTHER; note = 2'-O-methyluridine-3'-phosphorothioate
  modified_base 2: mod_base = OTHER; note = 2'-O-methylcytidine-3'-phosphorothioate
  modified_base 3: mod_base = OTHER; note = 2'-O-methyladenosine-3'-phosphate
  modified_base 4: mod_base = OTHER; note = 2'-O-methylcytidine-3'-phosphate
  modified_base 5: mod_base = OTHER; note = 2'-O-methyladenosine-3'-phosphate
  modified_base 6: mod_base = OTHER; note = 2'-O-hexadecyl-guanosine-3'-phosphate
  modified_base 7: mod_base = OTHER; note = 2'-deoxy-2'-fluoroguanosine-3'-phosphate
  modified_base 8: mod_base = OTHER; note = 2'-O-methyluridine-3'-phosphate
  modified_base 9: mod_base = OTHER; note = 2'-deoxy-2'-fluorouridine-3'-phosphate
  modified_base 10: mod_base = OTHER; note = 2'-deoxy-2'-fluorocytidine-3'-phosphate
  modified_base 11: mod_base = OTHER; note = 2'-deoxy-2'-fluorocytidine-3'-phosphate
  modified_base 12: mod_base = OTHER; note = 2'-O-methylguanosine-3'-phosphate
  modified_base 13: mod_base = OTHER; note = 2'-O-methyladenosine-3'-phosphate
  modified_base 14: mod_base = OTHER; note = 2'-O-methylguanosine-3'-phosphate
  modified_base 15: mod_base = OTHER; note = 2'-O-methylguanosine-3'-phosphate
  modified_base 16: mod_base = OTHER; note = 2'-O-methyluridine-3'-phosphate
  modified_base 17: mod_base = OTHER; note = 2'-O-methyluridine-3'-phosphate
  modified_base 18: mod_base = OTHER; note = 2'-O-methyluridine-3'-phosphate
  modified_base 19: mod_base = OTHER; note = 2'-O-methylguanosine-3'-phosphorothioate
  modified_base 20: mod_base = OTHER; note = 2'-O-methylguanosine-3'-phosphorothioate
  modified_base 21: mod_base = OTHER; note = 2'-O-methyladenosine
tcacaggttccgaggtttgga

SEQ ID NO: 307 - RNA, 21 nt, synthetic construct
  source 1..21: mol_type = other RNA
  modified_base 1: mod_base = OTHER; note = 2'-O-methyluridine-3'-phosphorothioate
  modified_base 2: mod_base = OTHER; note = 2'-O-methyladenosine-3'-phosphorothioate
  modified_base 3: mod_base = OTHER; note = 2'-O-methyladenosine-3'-phosphate
  modified_base 4: mod_base = OTHER; note = 2'-O-methyladenosine-3'-phosphate
  modified_base 5: mod_base = OTHER; note = 2'-O-methylguanosine-3'-phosphate
  modified_base 6: mod_base = OTHER; note = 2'-O-hexadecyl-cytidine-3'-phosphate
  modified_base 7: mod_base = OTHER; note = 2'-deoxy-2'-fluoroadenosine-3'-phosphate
  modified_base 8: mod_base = OTHER; note = 2'-O-methyluridine-3'-phosphate
  modified_base 9: mod_base = OTHER; note = 2'-deoxy-2'-fluoroadenosine-3'-phosphate
  modified_base 10: mod_base = OTHER; note = 2'-deoxy-2'-fluoroguanosine-3'-phosphate
  modified_base 11: mod_base = OTHER; note = 2'-deoxy-2'-fluoroadenosine-3'-phosphate
  modified_base 12: mod_base = OTHER; note = 2'-O-methylcytidine-3'-phosphate
  modified_base 13: mod_base = OTHER; note = 2'-O-methylguanosine-3'-phosphate
  modified_base 14: mod_base = OTHER; note = 2'-O-methylguanosine-3'-phosphate
  modified_base 15: mod_base = OTHER; note = 2'-O-methyladenosine-3'-phosphate
  modified_base 16: mod_base = OTHER; note = 2'-O-methylcytidine-3'-phosphate
  modified_base 17: mod_base = OTHER; note = 2'-O-methyladenosine-3'-phosphate
  modified_base 18: mod_base = OTHER; note = 2'-O-methyluridine-3'-phosphate
  modified_base 19: mod_base = OTHER; note = 2'-O-methylcytidine-3'-phosphorothioate
  modified_base 20: mod_base = OTHER; note = 2'-O-methyluridine-3'-phosphorothioate
  modified_base 21: mod_base = OTHER; note = 2'-O-methyladenosine
taaagcatagacggacatcta

SEQ ID NO: 308 - RNA, 21 nt, synthetic construct
  source 1..21: mol_type = other RNA
  modified_base 1: mod_base = OTHER; note = 2'-O-methylcytidine-3'-phosphorothioate
  modified_base 2: mod_base = OTHER; note = 2'-O-methyladenosine-3'-phosphorothioate
  modified_base 3: mod_base = OTHER; note = 2'-O-methyluridine-3'-phosphate
  modified_base 4: mod_base = OTHER; note = 2'-O-methylcytidine-3'-phosphate
  modified_base 5: mod_base = OTHER; note = 2'-O-methyluridine-3'-phosphate
  modified_base 6: mod_base = OTHER; note = 2'-O-hexadecyl-guanosine-3'-phosphate
  modified_base 7: mod_base = OTHER; note = 2'-deoxy-2'-fluoroadenosine-3'-phosphate
  modified_base 8: mod_base = OTHER; note = 2'-O-methyladenosine-3'-phosphate
  modified_base 9: mod_base = OTHER; note = 2'-deoxy-2'-fluoroadenosine-3'-phosphate
  modified_base 10: mod_base = OTHER; note = 2'-deoxy-2'-fluorocytidine-3'-phosphate
  modified_base 11: mod_base = OTHER; note = 2'-deoxy-2'-fluorocytidine-3'-phosphate
  modified_base 12: mod_base = OTHER; note = 2'-O-methyluridine-3'-phosphate
  modified_base 13: mod_base = OTHER; note = 2'-O-methylcytidine-3'-phosphate
  modified_base 14: mod_base = OTHER; note = 2'-O-methylcytidine-3'-phosphate
  modified_base 15: mod_base = OTHER; note = 2'-O-methyladenosine-3'-phosphate
  modified_base 16: mod_base = OTHER; note = 2'-O-methyluridine-3'-phosphate
  modified_base 17: mod_base = OTHER; note = 2'-O-methylcytidine-3'-phosphate
  modified_base 18: mod_base = OTHER; note = 2'-O-methyluridine-3'-phosphate
  modified_base 19: mod_base = OTHER; note = 2'-O-methylcytidine-3'-phosphorothioate
  modified_base 20: mod_base = OTHER; note = 2'-O-methyladenosine-3'-phosphorothioate
  modified_base 21: mod_base = OTHER; note = 2'-O-methyladenosine
catctgaaacctccatctcaa

SEQ ID NO: 309 - RNA, 21 nt, synthetic construct
  source 1..21: mol_type = other RNA
  modified_base 1: mod_base = OTHER; note = 2'-O-methylcytidine-3'-phosphorothioate
  modified_base 2: mod_base = OTHER; note = 2'-O-methylguanosine-3'-phosphorothioate
  modified_base 3: mod_base = OTHER; note = 2'-O-methyladenosine-3'-phosphate
  modified_base 4: mod_base = OTHER; note = 2'-O-methylguanosine-3'-phosphate
  modified_base 5: mod_base = OTHER; note = 2'-O-methyluridine-3'-phosphate
  modified_base 6: mod_base = OTHER; note = 2'-O-hexadecyl-cytidine-3'-phosphate
  modified_base 7: mod_base = OTHER; note = 2'-deoxy-2'-fluoroadenosine-3'-phosphate
  modified_base 8: mod_base = OTHER; note = 2'-O-methyluridine-3'-phosphate
  modified_base 9: mod_base = OTHER; note = 2'-deoxy-2'-fluorocytidine-3'-phosphate
  modified_base 10: mod_base = OTHER; note = 2'-deoxy-2'-fluorouridine-3'-phosphate
  modified_base 11: mod_base = OTHER; note = 2'-deoxy-2'-fluoroguanosine-3'-phosphate
  modified_base 12: mod_base = OTHER; note = 2'-O-methylcytidine-3'-phosphate
  modified_base 13: mod_base = OTHER; note = 2'-O-methylguanosine-3'-phosphate
  modified_base 14: mod_base = OTHER; note = 2'-O-methylcytidine-3'-phosphate
  modified_base 15: mod_base = OTHER; note = 2'-O-methyluridine-3'-phosphate
  modified_base 16: mod_base = OTHER; note = 2'-O-methyladenosine-3'-phosphate
  modified_base 17: mod_base = OTHER; note = 2'-O-methyladenosine-3'-phosphate
  modified_base 18: mod_base = OTHER; note = 2'-O-methyladenosine-3'-phosphate
  modified_base 19: mod_base = OTHER; note = 2'-O-methylguanosine-3'-phosphorothioate
  modified_base 20: mod_base = OTHER; note = 2'-O-methyluridine-3'-phosphorothioate
  modified_base 21: mod_base = OTHER; note = 2'-O-methyladenosine
cgagtcatctgcgctaaagta

SEQ ID NO: 310 - RNA, 21 nt, synthetic construct
  source 1..21: mol_type = other RNA
  modified_base 1: mod_base = OTHER; note = 2'-O-methylguanosine-3'-phosphorothioate
  modified_base 2: mod_base = OTHER; note = 2'-O-methyladenosine-3'-phosphorothioate
  modified_base 3: mod_base = OTHER; note = 2'-O-methylguanosine-3'-phosphate
  modified_base 4: mod_base = OTHER; note = 2'-O-methyladenosine-3'-phosphate
  modified_base 5: mod_base = OTHER; note = 2'-O-methyluridine-3'-phosphate
  modified_base 6: mod_base = OTHER; note = 2'-O-hexadecyl-cytidine-3'-phosphate
  modified_base 7: mod_base = OTHER; note = 2'-deoxy-2'-fluorocytidine-3'-phosphate
  modified_base 8: mod_base = OTHER; note = 2'-O-methyluridine-3'-phosphate
  modified_base 9: mod_base = OTHER; note = 2'-deoxy-2'-fluorouridine-3'-phosphate
  modified_base 10: mod_base = OTHER; note = 2'-deoxy-2'-fluoroadenosine-3'-phosphate
  modified_base 11: mod_base = OTHER; note = 2'-deoxy-2'-fluoroadenosine-3'-phosphate
  modified_base 12: mod_base = OTHER; note = 2'-O-methyluridine-3'-phosphate
  modified_base 13: mod_base = OTHER; note = 2'-O-methyluridine-3'-phosphate
  modified_base 14: mod_base = OTHER; note = 2'-O-methyladenosine-3'-phosphate
  modified_base 15: mod_base = OTHER; note = 2'-O-methylcytidine-3'-phosphate
  modified_base 16: mod_base = OTHER; note = 2'-O-methyladenosine-3'-phosphate
  modified_base 17: mod_base = OTHER; note = 2'-O-methyladenosine-3'-phosphate
  modified_base 18: mod_base = OTHER; note = 2'-O-methyladenosine-3'-phosphate
  modified_base 19: mod_base = OTHER; note = 2'-O-methylguanosine-3'-phosphorothioate
  modified_base 20: mod_base = OTHER; note = 2'-O-methyladenosine-3'-phosphorothioate
  modified_base 21: mod_base = OTHER; note = 2'-O-methyladenosine
gagatccttaattacaaagaa

SEQ ID NO: 311 - RNA, 21 nt, synthetic construct
  source 1..21: mol_type = other RNA
  modified_base 1: mod_base = OTHER; note = 2'-O-methylguanosine-3'-phosphorothioate
  modified_base 2: mod_base = OTHER; note = 2'-O-methyluridine-3'-phosphorothioate
  modified_base 3: mod_base = OTHER; note = 2'-O-methylcytidine-3'-phosphate
  modified_base 4: mod_base = OTHER; note = 2'-O-methyluridine-3'-phosphate
  modified_base 5: mod_base = OTHER; note = 2'-O-methyladenosine-3'-phosphate
  modified_base 6: mod_base = OTHER; note = 2'-O-hexadecyl-uridine-3'-phosphate
  modified_base 7: mod_base = OTHER; note = 2'-deoxy-2'-fluorocytidine-3'-phosphate
  modified_base 8: mod_base = OTHER; note = 2'-O-methyluridine-3'-phosphate
  modified_base 9: mod_base = OTHER; note = 2'-deoxy-2'-fluoroadenosine-3'-phosphate
  modified_base 10: mod_base = OTHER; note = 2'-deoxy-2'-fluorocytidine-3'-phosphate
  modified_base 11: mod_base = OTHER; note = 2'-deoxy-2'-fluoroguanosine-3'-phosphate
  modified_base 12: mod_base = OTHER; note = 2'-O-methyladenosine-3'-phosphate
  modified_base 13: mod_base = OTHER; note = 2'-O-methylguanosine-3'-phosphate
  modified_base 14: mod_base = OTHER; note = 2'-O-methylguanosine-3'-phosphate
  modified_base 15: mod_base = OTHER; note = 2'-O-methyluridine-3'-phosphate
  modified_base 16: mod_base = OTHER; note = 2'-O-methyladenosine-3'-phosphate
  modified_base 17: mod_base = OTHER; note = 2'-O-methylcytidine-3'-phosphate
  modified_base 18: mod_base = OTHER; note = 2'-O-methyladenosine-3'-phosphate
  modified_base 19: mod_base = OTHER; note = 2'-O-methyladenosine-3'-phosphorothioate
  modified_base 20: mod_base = OTHER; note = 2'-O-methylcytidine-3'-phosphorothioate
  modified_base 21: mod_base = OTHER; note = 2'-O-methyladenosine
gtctatctacgaggtacaaca

SEQ ID NO: 312 - RNA, 21 nt, synthetic construct
  source 1..21: mol_type = other RNA
  modified_base 1: mod_base = OTHER; note = 2'-O-methyladenosine-3'-phosphorothioate
  modified_base 2: mod_base = OTHER; note = 2'-O-methyluridine-3'-phosphorothioate
  modified_base 3: mod_base = OTHER; note = 2'-O-methyluridine-3'-phosphate
  modified_base 4: mod_base = OTHER; note = 2'-O-methyluridine-3'-phosphate
  modified_base 5: mod_base = OTHER; note = 2'-O-methylcytidine-3'-phosphate
  modified_base 6: mod_base = OTHER; note = 2'-O-hexadecyl-cytidine-3'-phosphate
  modified_base 7: mod_base = OTHER; note = 2'-deoxy-2'-fluorouridine-3'-phosphate
  modified_base 8: mod_base = OTHER; note = 2'-O-methyladenosine-3'-phosphate
  modified_base 9: mod_base = OTHER; note = 2'-deoxy-2'-fluorouridine-3'-phosphate
  modified_base 10: mod_base = OTHER; note = 2'-deoxy-2'-fluoroguanosine-3'-phosphate
  modified_base 11: mod_base = OTHER; note = 2'-deoxy-2'-fluoroadenosine-3'-phosphate
  modified_base 12: mod_base = OTHER; note = 2'-O-methylguanosine-3'-phosphate
  modified_base 13: mod_base = OTHER; note = 2'-O-methylcytidine-3'-phosphate
  modified_base 14: mod_base = OTHER; note = 2'-O-methylcytidine-3'-phosphate
  modified_base 15: mod_base = OTHER; note = 2'-O-methyluridine-3'-phosphate
  modified_base 16: mod_base = OTHER; note = 2'-O-methylcytidine-3'-phosphate
  modified_base 17: mod_base = OTHER; note = 2'-O-methyladenosine-3'-phosphate
  modified_base 18: mod_base = OTHER; note = 2'-O-methyluridine-3'-phosphate
  modified_base 19: mod_base = OTHER; note = 2'-O-methyluridine-3'-phosphorothioate
  modified_base 20: mod_base = OTHER; note = 2'-O-methylcytidine-3'-phosphorothioate
  modified_base 21: mod_base = OTHER; note = 2'-O-methyladenosine
atttcctatgagcctcattca

SEQ ID NO: 313 - RNA, 21 nt, synthetic construct
  source 1..21: mol_type = other RNA
  modified_base 1: mod_base = OTHER; note = 2'-O-methylcytidine-3'-phosphorothioate
  modified_base 2: mod_base = OTHER; note = 2'-O-methyladenosine-3'-phosphorothioate
  modified_base 3: mod_base = OTHER; note = 2'-O-methyluridine-3'-phosphate
  modified_base 4: mod_base = OTHER; note = 2'-O-methyluridine-3'-phosphate
  modified_base 5: mod_base = OTHER; note = 2'-O-methylcytidine-3'-phosphate
  modified_base 6: mod_base = OTHER; note = 2'-O-hexadecyl-cytidine-3'-phosphate
  modified_base 7: mod_base = OTHER; note = 2'-deoxy-2'-fluoroadenosine-3'-phosphate
  modified_base 8: mod_base = OTHER; note = 2'-O-methylguanosine-3'-phosphate
  modified_base 9: mod_base = OTHER; note = 2'-deoxy-2'-fluoroadenosine-3'-phosphate
  modified_base 10: mod_base = OTHER; note = 2'-deoxy-2'-fluorouridine-3'-phosphate
  modified_base 11: mod_base = OTHER; note = 2'-deoxy-2'-fluoroadenosine-3'-phosphate
  modified_base 12: mod_base = OTHER; note = 2'-O-methylcytidine-3'-phosphate
  modified_base 13: mod_base = OTHER; note = 2'-O-methyladenosine-3'-phosphate
  modified_base 14: mod_base = OTHER; note = 2'-O-methyluridine-3'-phosphate
  modified_base 15: mod_base = OTHER; note = 2'-O-methylguanosine-3'-phosphate
  modified_base 16: mod_base = OTHER; note = 2'-O-methyluridine-3'-phosphate
  modified_base 17: mod_base = OTHER; note = 2'-O-methylcytidine-3'-phosphate
  modified_base 18: mod_base = OTHER; note = 2'-O-methylcytidine-3'-phosphate
  modified_base 19: mod_base = OTHER; note = 2'-O-methylguanosine-3'-phosphorothioate
  modified_base 20: mod_base = OTHER; note = 2'-O-methyladenosine-3'-phosphorothioate
  modified_base 21: mod_base = OTHER; note = 2'-O-methyladenosine
cattccagatacatgtccgaa

SEQ ID NO: 314 - RNA, 21 nt, synthetic construct
  source 1..21: mol_type = other RNA
  modified_base 1: mod_base = OTHER; note = 2'-O-methyluridine-3'-phosphorothioate
  modified_base 2: mod_base = OTHER; note = 2'-O-methylcytidine-3'-phosphorothioate
  modified_base 3: mod_base = OTHER; note = 2'-O-methylcytidine-3'-phosphate
  modified_base 4: mod_base = OTHER; note = 2'-O-methylguanosine-3'-phosphate
  modified_base 5: mod_base = OTHER; note = 2'-O-methyladenosine-3'-phosphate
  modified_base 6: mod_base = OTHER; note = 2'-O-hexadecyl-cytidine-3'-phosphate
  modified_base 7: mod_base = OTHER; note = 2'-deoxy-2'-fluoroguanosine-3'-phosphate
  modified_base 8: mod_base = OTHER; note = 2'-O-methyladenosine-3'-phosphate
  modified_base 9: mod_base = OTHER; note = 2'-deoxy-2'-fluoroguanosine-3'-phosphate
  modified_base 10: mod_base = OTHER; note = 2'-deoxy-2'-fluoroadenosine-3'-phosphate
  modified_base 11: mod_base = OTHER; note = 2'-deoxy-2'-fluorouridine-3'-phosphate
  modified_base 12: mod_base = OTHER; note = 2'-O-methylguanosine-3'-phosphate
  modified_base 13: mod_base = OTHER; note = 2'-O-methylcytidine-3'-phosphate
  modified_base 14: mod_base = OTHER; note = 2'-O-methyluridine-3'-phosphate
  modified_base 15: mod_base = OTHER; note = 2'-O-methylguanosine-3'-phosphate
  modified_base 16: mod_base = OTHER; note = 2'-O-methylguanosine-3'-phosphate
  modified_base 17: mod_base = OTHER; note = 2'-O-methyladenosine-3'-phosphate
  modified_base 18: mod_base = OTHER; note = 2'-O-methylguanosine-3'-phosphate
  modified_base 19: mod_base = OTHER; note = 2'-O-methyladenosine-3'-phosphorothioate
  modified_base 20: mod_base = OTHER; note = 2'-O-methylguanosine-3'-phosphorothioate
  modified_base 21: mod_base = OTHER; note = 2'-O-methyladenosine
tccgacgagatgctggagaga

SEQ ID NO: 315 - RNA, 21 nt, synthetic construct
  source 1..21: mol_type = other RNA
  modified_base 1: mod_base = OTHER; note = 2'-O-methyladenosine-3'-phosphorothioate
  modified_base 2: mod_base = OTHER; note = 2'-O-methylguanosine-3'-phosphorothioate
  modified_base 3: mod_base = OTHER; note = 2'-O-methyluridine-3'-phosphate
  modified_base 4: mod_base = OTHER; note = 2'-O-methylcytidine-3'-phosphate
  modified_base 5: mod_base = OTHER; note = 2'-O-methylguanosine-3'-phosphate
  modified_base 6: mod_base = OTHER; note = 2'-O-hexadecyl-cytidine-3'-phosphate
  modified_base 7: mod_base = OTHER; note = 2'-deoxy-2'-fluorouridine-3'-phosphate
  modified_base 8: mod_base = OTHER; note = 2'-O-methylguanosine-3'-phosphate
  modified_base 9: mod_base = OTHER; note = 2'-deoxy-2'-fluoroguanosine-3'-phosphate
  modified_base 10: mod_base = OTHER; note = 2'-deoxy-2'-fluoroguanosine-3'-phosphate
  modified_base 11: mod_base = OTHER; note = 2'-deoxy-2'-fluoroadenosine-3'-phosphate
  modified_base 12: mod_base = OTHER; note = 2'-O-methyladenosine-3'-phosphate
  modified_base 13: mod_base = OTHER; note = 2'-O-methylcytidine-3'-phosphate
  modified_base 14: mod_base = OTHER; note = 2'-O-methyladenosine-3'-phosphate
  modified_base 15: mod_base = OTHER; note = 2'-O-methyluridine-3'-phosphate
  modified_base 16: mod_base = OTHER; note = 2'-O-methyluridine-3'-phosphate
  modified_base 17: mod_base = OTHER; note = 2'-O-methyladenosine-3'-phosphate
  modified_base 18: mod_base = OTHER; note = 2'-O-methyluridine-3'-phosphate
  modified_base 19: mod_base = OTHER; note = 2'-O-methylcytidine-3'-phosphorothioate
  modified_base 20: mod_base = OTHER; note = 2'-O-methyluridine-3'-phosphorothioate
  modified_base 21: mod_base = OTHER; note = 2'-O-methyladenosine
agtcgctgggaacattatcta

SEQ ID NO: 316 - RNA, 21 nt, synthetic construct
  source 1..21: mol_type = other RNA
  modified_base 1: mod_base = OTHER; note = 2'-O-methylcytidine-3'-phosphorothioate
  modified_base 2: mod_base = OTHER; note = 2'-O-methyladenosine-3'-phosphorothioate
  modified_base 3: mod_base = OTHER; note = 2'-O-methylguanosine-3'-phosphate
  modified_base 4: mod_base = OTHER; note = 2'-O-methylguanosine-3'-phosphate
  modified_base 5: mod_base = OTHER; note = 2'-O-methyladenosine-3'-phosphate
  modified_base 6: mod_base = OTHER; note = 2'-O-hexadecyl-cytidine-3'-phosphate
  modified_base 7: mod_base = OTHER; note = 2'-deoxy-2'-fluoroadenosine-3'-phosphate
  modified_base 8: mod_base = OTHER; note = 2'-O-methyluridine-3'-phosphate
  modified_base 9: mod_base = OTHER; note = 2'-deoxy-2'-fluorocytidine-3'-phosphate
  modified_base 10: mod_base = OTHER; note = 2'-deoxy-2'-fluorouridine-3'-phosphate
  modified_base 11: mod_base = OTHER; note = 2'-deoxy-2'-fluoroadenosine-3'-phosphate
  modified_base 12: mod_base = OTHER; note = 2'-O-methylcytidine-3'-phosphate
  modified_base 13: mod_base = OTHER; note = 2'-O-methylguanosine-3'-phosphate
  modified_base 14: mod_base = OTHER; note = 2'-O-methyladenosine-3'-phosphate
  modified_base 15: mod_base = OTHER; note = 2'-O-methylguanosine-3'-phosphate
  modified_base 16: mod_base = OTHER; note = 2'-O-methyladenosine-3'-phosphate
  modified_base 17: mod_base = OTHER; note = 2'-O-methyladenosine-3'-phosphate
  modified_base 18: mod_base = OTHER; note = 2'-O-methylcytidine-3'-phosphate
  modified_base 19: mod_base = OTHER; note = 2'-O-methylcytidine-3'-phosphorothioate
  modified_base 20: mod_base = OTHER; note = 2'-O-methyluridine-3'-phosphorothioate
  modified_base 21: mod_base = OTHER; note = 2'-O-methyladenosine
caggacatctacgagaaccta

SEQ ID NO: 317 - RNA, 21 nt, synthetic construct
  source 1..21: mol_type = other RNA
  modified_base 1: mod_base = OTHER; note = 2'-O-methyluridine-3'-phosphorothioate
  modified_base 2: mod_base = OTHER; note = 2'-O-methylcytidine-3'-phosphorothioate
  modified_base 3: mod_base = OTHER; note = 2'-O-methyladenosine-3'-phosphate
  modified_base 4: mod_base = OTHER; note = 2'-O-methylcytidine-3'-phosphate
  modified_base 5: mod_base = OTHER; note = 2'-O-methylcytidine-3'-phosphate
  modified_base 6: mod_base = OTHER; note = 2'-O-hexadecyl-adenosine-3'-phosphate
  modified_base 7: mod_base = OTHER; note = 2'-deoxy-2'-fluorocytidine-3'-phosphate
  modified_base 8: mod_base = OTHER; note = 2'-O-methyluridine-3'-phosphate
  modified_base 9: mod_base = OTHER; note = 2'-deoxy-2'-fluoroadenosine-3'-phosphate
  modified_base 10: mod_base = OTHER; note = 2'-deoxy-2'-fluorocytidine-3'-phosphate
  modified_base 11: mod_base = OTHER; note = 2'-deoxy-2'-fluorouridine-3'-phosphate
  modified_base 12: mod_base = OTHER; note = 2'-O-methyladenosine-3'-phosphate
  modified_base 13: mod_base = OTHER; note = 2'-O-methylcytidine-3'-phosphate
  modified_base 14: mod_base = OTHER; note = 2'-O-methylcytidine-3'-phosphate
  modified_base 15: mod_base = OTHER; note = 2'-O-methylguanosine-3'-phosphate
  modified_base 16: mod_base = OTHER; note = 2'-O-methylcytidine-3'-phosphate
  modified_base 17: mod_base = OTHER; note = 2'-O-methyluridine-3'-phosphate
  modified_base 18: mod_base = OTHER; note = 2'-O-methylcytidine-3'-phosphate
  modified_base 19: mod_base = OTHER; note = 2'-O-methyluridine-3'-phosphorothioate
  modified_base 20: mod_base = OTHER; note = 2'-O-methylguanosine-3'-phosphorothioate
  modified_base 21: mod_base = OTHER; note = 2'-O-methyladenosine
tcaccactactaccgctctga

SEQ ID NO: 318 - RNA, 21 nt, synthetic construct
  source 1..21: mol_type = other RNA
  modified_base 1: mod_base = OTHER; note = 2'-O-methylcytidine-3'-phosphorothioate
  modified_base 2: mod_base = OTHER; note = 2'-O-methyladenosine-3'-phosphorothioate
  modified_base 3: mod_base = OTHER; note = 2'-O-methyluridine-3'-phosphate
  modified_base 4: mod_base = OTHER; note = 2'-O-methyladenosine-3'-phosphate
  modified_base 5: mod_base = OTHER; note = 2'-O-methylcytidine-3'-phosphate
  modified_base 6: mod_base = OTHER; note = 2'-O-hexadecyl-cytidine-3'-phosphate
  modified_base 7: mod_base = OTHER; note = 2'-deoxy-2'-fluoroadenosine-3'-phosphate
  modified_base 8: mod_base = OTHER; note = 2'-O-methyluridine-3'-phosphate
  modified_base 9: mod_base = OTHER; note = 2'-deoxy-2'-fluoroadenosine-3'-phosphate
  modified_base 10: mod_base = OTHER; note = 2'-deoxy-2'-fluoroguanosine-3'-phosphate
  modified_base 11: mod_base = OTHER; note = 2'-deoxy-2'-fluorocytidine-3'-phosphate
  modified_base 12: mod_base = OTHER; note = 2'-O-methylcytidine-3'-phosphate
  modified_base 13: mod_base = OTHER; note = 2'-O-methyladenosine-3'-phosphate
  modified_base 14: mod_base = OTHER; note = 2'-O-methylguanosine-3'-phosphate
  modified_base 15: mod_base = OTHER; note = 2'-O-methyluridine-3'-phosphate
  modified_base 16: mod_base = OTHER; note = 2'-O-methyluridine-3'-phosphate
  modified_base 17: mod_base = OTHER; note = 2'-O-methyladenosine-3'-phosphate
  modified_base 18: mod_base = OTHER; note = 2'-O-methylguanosine-3'-phosphate
  modified_base 19: mod_base = OTHER; note = 2'-O-methyladenosine-3'-phosphorothioate
  modified_base 20: mod_base = OTHER; note = 2'-O-methyluridine-3'-phosphorothioate
  modified_base 21: mod_base = OTHER; note = 2'-O-methyladenosine
cataccatagccagttagata

SEQ ID NO: 319 - RNA, 21 nt, synthetic construct
  source 1..21: mol_type = other RNA
  modified_base 1: mod_base = OTHER; note = 2'-O-methylcytidine-3'-phosphorothioate
  modified_base 2: mod_base = OTHER; note = 2'-O-methylcytidine-3'-phosphorothioate
  modified_base 3: mod_base = OTHER; note = 2'-O-methyladenosine-3'-phosphate
  modified_base 4: mod_base = OTHER; note = 2'-O-methylcytidine-3'-phosphate
  modified_base 5: mod_base = OTHER; note = 2'-O-methyluridine-3'-phosphate
  modified_base 6: mod_base = OTHER; note = 2'-O-hexadecyl-cytidine-3'-phosphate
  modified_base 7: mod_base = OTHER; note = 2'-deoxy-2'-fluorocytidine-3'-phosphate
  modified_base 8: mod_base = OTHER; note = 2'-O-methyladenosine-3'-phosphate
  modified_base 9: mod_base = OTHER; note = 2'-deoxy-2'-fluoroadenosine-3'-phosphate
  modified_base 10: mod_base = OTHER; note = 2'-deoxy-2'-fluorocytidine-3'-phosphate
  modified_base 11: mod_base = OTHER; note = 2'-deoxy-2'-fluorocytidine-3'-phosphate
  modified_base 12: mod_base = OTHER; note = 2'-O-methyluridine-3'-phosphate
  modified_base 13: mod_base = OTHER; note = 2'-O-methylcytidine-3'-phosphate
  modified_base 14: mod_base = OTHER; note = 2'-O-methyluridine-3'-phosphate
  modified_base 15: mod_base = OTHER; note = 2'-O-methyluridine-3'-phosphate
  modified_base 16: mod_base = OTHER; note = 2'-O-methyladenosine-3'-phosphate
  modified_base 17: mod_base = OTHER; note = 2'-O-methylcytidine-3'-phosphate
  modified_base 18: mod_base = OTHER; note = 2'-O-methylcytidine-3'-phosphate
  modified_base 19: mod_base = OTHER; note = 2'-O-methyladenosine-3'-phosphorothioate
  modified_base 20: mod_base = OTHER; note = 2'-O-methylguanosine-3'-phosphorothioate
  modified_base 21: mod_base = OTHER; note = 2'-O-methyladenosine
ccactccaacctcttaccaga

SEQ ID NO: 320 - RNA, 21 nt, synthetic construct
  source 1..21: mol_type = other RNA
  modified_base 1: mod_base = OTHER; note = 2'-O-methylcytidine-3'-phosphorothioate
  modified_base 2: mod_base = OTHER; note = 2'-O-methyluridine-3'-phosphorothioate
  modified_base 3: mod_base = OTHER; note = 2'-O-methylcytidine-3'-phosphate
  modified_base 4: mod_base = OTHER; note = 2'-O-methylcytidine-3'-phosphate
  modified_base 5: mod_base = OTHER; note = 2'-O-methylcytidine-3'-phosphate
  modified_base 6: mod_base = OTHER; note = 2'-O-hexadecyl-adenosine-3'-phosphate
  modified_base 7: mod_base = OTHER; note = 2'-deoxy-2'-fluoroadenosine-3'-phosphate
  modified_base 8: mod_base = OTHER; note = 2'-O-methylguanosine-3'-phosphate
  modified_base 9: mod_base = OTHER; note = 2'-deoxy-2'-fluorocytidine-3'-phosphate
  modified_base 10: mod_base = OTHER; note = 2'-deoxy-2'-fluoroadenosine-3'-phosphate
  modified_base 11: mod_base = OTHER; note = 2'-deoxy-2'-fluorocytidine-3'-phosphate
  modified_base 12: mod_base = OTHER; note = 2'-O-methyluridine-3'-phosphate
  modified_base 13: mod_base = OTHER; note = 2'-O-methyluridine-3'-phosphate
  modified_base 14: mod_base = OTHER; note = 2'-O-methyluridine-3'-phosphate
  modified_base 15: mod_base = OTHER; note = 2'-O-methylcytidine-3'-phosphate
  modified_base 16: mod_base = OTHER; note = 2'-O-methyladenosine-3'-phosphate
  modified_base 17: mod_base = OTHER; note = 2'-O-methylcytidine-3'-phosphate
  modified_base 18: mod_base = OTHER; note = 2'-O-methyladenosine-3'-phosphate
  modified_base 19: mod_base = OTHER; note = 2'-O-methyluridine-3'-phosphorothioate
  modified_base 20: mod_base = OTHER; note = 2'-O-methylcytidine-3'-phosphorothioate
  modified_base 21: mod_base = OTHER; note = 2'-O-methyladenosine
ctcccaagcactttcacatca

SEQ ID NO: 321 - RNA, 21 nt, synthetic construct
  source 1..21: mol_type = other RNA
  modified_base 1: mod_base = OTHER; note = 2'-O-methylguanosine-3'-phosphorothioate
  modified_base 2: mod_base = OTHER; note = 2'-O-methyladenosine-3'-phosphorothioate
  modified_base 3: mod_base = OTHER; note = 2'-O-methylcytidine-3'-phosphate
  modified_base 4: mod_base = OTHER; note = 2'-O-methyladenosine-3'-phosphate
  modified_base 5: mod_base = OTHER; note = 2'-O-methylguanosine-3'-phosphate
  modified_base 6: mod_base = OTHER; note = 2'-O-hexadecyl-uridine-3'-phosphate
  modified_base 7: mod_base = OTHER; note = 2'-deoxy-2'-fluoroadenosine-3'-phosphate
  modified_base 8: mod_base = OTHER; note = 2'-O-methyladenosine-3'-phosphate
  modified_base 9: mod_base = OTHER; note = 2'-deoxy-2'-fluorocytidine-3'-phosphate
  modified_base 10: mod_base = OTHER; note = 2'-deoxy-2'-fluoroadenosine-3'-phosphate
  modified_base 11: mod_base = OTHER; note = 2'-deoxy-2'-fluorouridine-3'-phosphate
  modified_base 12: mod_base = OTHER; note = 2'-O-methylcytidine-3'-phosphate
  modified_base 13: mod_base = OTHER; note = 2'-O-methyluridine-3'-phosphate
  modified_base 14: mod_base = OTHER; note = 2'-O-methyladenosine-3'-phosphate
  modified_base 15: mod_base = OTHER; note = 2'-O-methylcytidine-3'-phosphate
  modified_base 16: mod_base = OTHER; note = 2'-O-methylcytidine-3'-phosphate
  modified_base 17: mod_base = OTHER; note = 2'-O-methylguanosine-3'-phosphate
  modified_base 18: mod_base = OTHER; note = 2'-O-methylguanosine-3'-phosphate
  modified_base 19: mod_base = OTHER; note = 2'-O-methyladenosine-3'-phosphorothioate
  modified_base 20: mod_base = OTHER; note = 2'-O-methyladenosine-3'-phosphorothioate
  modified_base 21: mod_base = OTHER; note = 2'-O-methyladenosine
gacagtaacatctaccggaaa

SEQ ID NO: 322 - RNA, 21 nt, synthetic construct
  source 1..21: mol_type = other RNA
  modified_base 1: mod_base = OTHER; note = 2'-O-methyluridine-3'-phosphorothioate
  modified_base 2: mod_base = OTHER; note = 2'-O-methylguanosine-3'-phosphorothioate
  modified_base 3: mod_base = OTHER; note = 2'-O-methylguanosine-3'-phosphate
  modified_base 4: mod_base = OTHER; note = 2'-O-methyluridine-3'-phosphate
  modified_base 5: mod_base = OTHER; note = 2'-O-methylguanosine-3'-phosphate
  modified_base 6: mod_base = OTHER; note = 2'-O-hexadecyl-adenosine-3'-phosphate
  modified_base 7: mod_base = OTHER; note = 2'-deoxy-2'-fluorouridine-3'-phosphate
  modified_base 8: mod_base = OTHER; note = 2'-O-methyluridine-3'-phosphate
  modified_base 9: mod_base = OTHER; note = 2'-deoxy-2'-fluorouridine-3'-phosphate
  modified_base 10: mod_base = OTHER; note = 2'-deoxy-2'-fluoroguanosine-3'-phosphate
  modified_base 11: mod_base = OTHER; note = 2'-deoxy-2'-fluorouridine-3'-phosphate
  modified_base 12: mod_base = OTHER; note = 2'-O-methylcytidine-3'-phosphate
  modified_base 13: mod_base = OTHER; note = 2'-O-methyluridine-3'-phosphate
  modified_base 14: mod_base = OTHER; note = 2'-O-methyladenosine-3'-phosphate
  modified_base 15: mod_base = OTHER; note = 2'-O-methylcytidine-3'-phosphate
  modified_base 16: mod_base = OTHER; note = 2'-O-methyladenosine-3'-phosphate
  modified_base 17: mod_base = OTHER; note = 2'-O-methylguanosine-3'-phosphate
  modified_base 18: mod_base = OTHER; note = 2'-O-methylcytidine-3'-phosphate
  modified_base 19: mod_base = OTHER; note = 2'-O-methyladenosine-3'-phosphorothioate
  modified_base 20: mod_base = OTHER; note = 2'-O-methyladenosine-3'-phosphorothioate
  modified_base 21: mod_base = OTHER; note = 2'-O-methyladenosine
tggtgatttgtctacagcaaa

SEQ ID NO: 323 - RNA, 21 nt, synthetic construct
  source 1..21: mol_type = other RNA
  modified_base 1: mod_base = OTHER; note = 2'-O-methyladenosine-3'-phosphorothioate
  modified_base 2: mod_base = OTHER; note = 2'-O-methylcytidine-3'-phosphorothioate
  modified_base 3: mod_base = OTHER; note = 2'-O-methyladenosine-3'-phosphate
  modified_base 4: mod_base = OTHER; note = 2'-O-methyladenosine-3'-phosphate
  modified_base 5: mod_base = OTHER; note = 2'-O-methylguanosine-3'-phosphate
  modified_base 6: mod_base = OTHER; note = 2'-O-hexadecyl-uridine-3'-phosphate
  modified_base 7: mod_base = OTHER; note = 2'-deoxy-2'-fluoroguanosine-3'-phosphate
  modified_base 8: mod_base = OTHER; note = 2'-O-methyladenosine-3'-phosphate
  modified_base 9: mod_base = OTHER; note = 2'-deoxy-2'-fluoroadenosine-3'-phosphate
  modified_base 10: mod_base = OTHER; note = 2'-deoxy-2'-fluoroguanosine-3'-phosphate
  modified_base 11: mod_base = OTHER; note = 2'-deoxy-2'-fluoroadenosine-3'-phosphate
  modified_base 12: mod_base = OTHER; note = 2'-O-methylcytidine-3'-phosphate
  modified_base 13: mod_base = OTHER; note = 2'-O-methyladenosine-3'-phosphate
  modified_base 14: mod_base = OTHER; note = 2'-O-methyluridine-3'-phosphate
  modified_base 15: mod_base = OTHER; note = 2'-O-methylcytidine-3'-phosphate
  modified_base 16: mod_base = OTHER; note = 2'-O-methyladenosine-3'-phosphate
  modified_base 17: mod_base = OTHER; note = 2'-O-methylguanosine-3'-phosphate
  modified_base 18: mod_base = OTHER; note = 2'-O-methylcytidine-3'-phosphate
  modified_base 19: mod_base = OTHER; note = 2'-O-methylcytidine-3'-phosphorothioate
  modified_base 20: mod_base = OTHER; note = 2'-O-methyladenosine-3'-phosphorothioate
  modified_base 21: mod_base = OTHER; note = 2'-O-methyladenosine
acaagtgaagacatcagccaa

SEQ ID NO: 324 - RNA, 21 nt, synthetic construct
  source 1..21: mol_type = other RNA
  modified_base 1: mod_base = OTHER; note = 2'-O-methyladenosine-3'-phosphorothioate
  modified_base 2: mod_base = OTHER; note = 2'-O-methylcytidine-3'-phosphorothioate
  modified_base 3: mod_base = OTHER; note = 2'-O-methylcytidine-3'-phosphate
  modified_base 4: mod_base = OTHER; note = 2'-O-methyluridine-3'-phosphate
  modified_base 5: mod_base = OTHER; note = 2'-O-methylcytidine-3'-phosphate
  modified_base 6: mod_base = OTHER; note = 2'-O-hexadecyl-cytidine-3'-phosphate
  modified_base 7: mod_base = OTHER; note = 2'-deoxy-2'-fluoroadenosine-3'-phosphate
  modified_base 8: mod_base = OTHER; note = 2'-O-methyladenosine-3'-phosphate
  modified_base 9: mod_base = OTHER; note = 2'-deoxy-2'-fluoroguanosine-3'-phosphate
  modified_base 10: mod_base = OTHER; note = 2'-deoxy-2'-fluorouridine-3'-phosphate
  modified_base 11: mod_base = OTHER; note = 2'-deoxy-2'-fluoroadenosine-3'-phosphate
  modified_base 12: mod_base = OTHER; note = 2'-O-methylcytidine-3'-phosphate
  modified_base 13: mod_base = OTHER; note = 2'-O-methyladenosine-3'-phosphate
  modified_base 14: mod_base = OTHER; note = 2'-O-methylguanosine-3'-phosphate
  modified_base 15: mod_base = OTHER; note = 2'-O-methyluridine-3'-phosphate
  modified_base 16: mod_base = OTHER; note = 2'-O-methylcytidine-3'-phosphate
  modified_base 17: mod_base = OTHER; note = 2'-O-methylcytidine-3'-phosphate
  modified_base 18: mod_base = OTHER; note = 2'-O-methylcytidine-3'-phosphate
  modified_base 19: mod_base = OTHER; note = 2'-O-methyladenosine-3'-phosphorothioate
  modified_base 20: mod_base = OTHER; note = 2'-O-methyluridine-3'-phosphorothioate
  modified_base 21: mod_base = OTHER; note = 2'-O-methyladenosine
acctccaagtacagtcccata

SEQ ID NO: 325 - RNA, 21 nt, synthetic construct
  source 1..21: mol_type = other RNA
  modified_base 1: mod_base = OTHER; note = 2'-O-methyluridine-3'-phosphorothioate
  modified_base 2: mod_base = OTHER; note = 2'-O-methylcytidine-3'-phosphorothioate
  modified_base 3: mod_base = OTHER; note = 2'-O-methylguanosine-3'-phosphate
  modified_base 4: mod_base = OTHER; note = 2'-O-methylguanosine-3'-phosphate
  modified_base 5: mod_base = OTHER; note = 2'-O-methyladenosine-3'-phosphate
  modified_base 6: mod_base = OTHER; note = 2'-O-hexadecyl-guanosine-3'-phosphate
  modified_base 7: mod_base = OTHER; note = 2'-deoxy-2'-fluorouridine-3'-phosphate
  modified_base 8: mod_base = OTHER; note = 2'-O-methylcytidine-3'-phosphate
  modified_base 9: mod_base = OTHER; note = 2'-deoxy-2'-fluorouridine-3'-phosphate
  modified_base 10: mod_base = OTHER; note = 2'-deoxy-2'-fluoroguanosine-3'-phosphate
  modified_base 11: mod_base = OTHER; note = 2'-deoxy-2'-fluoroadenosine-3'-phosphate
  modified_base 12: mod_base = OTHER; note = 2'-O-methylguanosine-3'-phosphate
  modified_base 13: mod_base = OTHER; note = 2'-O-methyluridine-3'-phosphate
  modified_base 14: mod_base = OTHER; note = 2'-O-methyladenosine-3'-phosphate
  modified_base 15: mod_base = OTHER; note = 2'-O-methylcytidine-3'-phosphate
  modified_base 16: mod_base = OTHER; note = 2'-O-methyluridine-3'-phosphate
  modified_base 17: mod_base = OTHER; note = 2'-O-methylguanosine-3'-phosphate
  modified_base 18: mod_base = OTHER; note = 2'-O-methylguanosine-3'-phosphate
  modified_base 19: mod_base = OTHER; note = 2'-O-methyladenosine-3'-phosphorothioate
  modified_base 20: mod_base = OTHER; note = 2'-O-methylcytidine-3'-phosphorothioate
  modified_base 21: mod_base = OTHER; note = 2'-O-methyladenosine
tcggagtctgagtactggaca

SEQ ID NO: 326 - RNA, 21 nt, synthetic construct
  source 1..21: mol_type = other RNA
  modified_base 1: mod_base = OTHER; note = 2'-O-methyladenosine-3'-phosphorothioate
  modified_base 2: mod_base = OTHER; note = 2'-O-methylguanosine-3'-phosphorothioate
  modified_base 3: mod_base = OTHER; note = 2'-O-methylcytidine-3'-phosphate
  modified_base 4: mod_base = OTHER; note = 2'-O-methylcytidine-3'-phosphate
  modified_base 5: mod_base = OTHER; note = 2'-O-methyladenosine-3'-phosphate
  modified_base 6: mod_base = OTHER; note = 2'-O-hexadecyl-guanosine-3'-phosphate
  modified_base 7: mod_base = OTHER; note = 2'-deoxy-2'-fluoroadenosine-3'-phosphate
  modified_base 8: mod_base = OTHER; note = 2'-O-methyladenosine-3'-phosphate
  modified_base 9: mod_base = OTHER; note = 2'-deoxy-2'-fluoroguanosine-3'-phosphate
  modified_base 10: mod_base = OTHER; note = 2'-deoxy-2'-fluoroguanosine-3'-phosphate
  modified_base 11: mod_base = OTHER; note = 2'-deoxy-2'-fluorouridine-3'-phosphate
  modified_base 12: mod_base = OTHER; note = 2'-O-methyluridine-3'-phosphate
  modified_base 13: mod_base = OTHER; note = 2'-O-methylcytidine-3'-phosphate
  modified_base 14: mod_base = OTHER; note = 2'-O-methyluridine-3'-phosphate
  modified_base 15: mod_base = OTHER; note = 2'-O-methylcytidine-3'-phosphate
  modified_base 16: mod_base = OTHER; note = 2'-O-methylguanosine-3'-phosphate
  modified_base 17: mod_base = OTHER; note = 2'-O-methyluridine-3'-phosphate
  modified_base 18: mod_base = OTHER; note = 2'-O-methylcytidine-3'-phosphate
  modified_base 19: mod_base = OTHER; note = 2'-O-methyluridine-3'-phosphorothioate
  modified_base 20: mod_base = OTHER; note = 2'-O-methylguanosine-3'-phosphorothioate
  modified_base 21: mod_base = OTHER; note = 2'-O-methyladenosine
agccagaaggttctcgtctga

SEQ ID NO: 327 - RNA, 21 nt, synthetic construct
  source 1..21: mol_type = other RNA
  modified_base 1: mod_base = OTHER; note = 2'-O-methylguanosine-3'-phosphorothioate
  modified_base 2: mod_base = OTHER; note = 2'-O-methyladenosine-3'-phosphorothioate
  modified_base 3: mod_base = OTHER; note = 2'-O-methylguanosine-3'-phosphate
  modified_base 4: mod_base = OTHER; note = 2'-O-methylguanosine-3'-phosphate
  modified_base 5: mod_base = OTHER; note = 2'-O-methyladenosine-3'-phosphate
  modified_base 6: mod_base = OTHER; note = 2'-O-hexadecyl-guanosine-3'-phosphate
  modified_base 7: mod_base = OTHER; note = 2'-deoxy-2'-fluoroguanosine-3'-phosphate
  modified_base 8: mod_base = OTHER; note = 2'-O-methyladenosine-3'-phosphate
  modified_base 9: mod_base = OTHER; note = 2'-deoxy-2'-fluorouridine-3'-phosphate
  modified_base 10: mod_base = OTHER; note = 2'-deoxy-2'-fluoroguanosine-3'-phosphate
  modified_base 11: mod_base = OTHER; note = 2'-deoxy-2'-fluoroadenosine-3'-phosphate
  modified_base 12: mod_base = OTHER; note = 2'-O-methyluridine-3'-phosphate
  modified_base 13: mod_base = OTHER; note = 2'-O-methyluridine-3'-phosphate
  modified_base 14: mod_base = OTHER; note = 2'-O-methyluridine-3'-phosphate
  modified_base 15: mod_base = OTHER; note = 2'-O-methyluridine-3'-phosphate
  modified_base 16: mod_base = OTHER; note = 2'-O-methylguanosine-3'-phosphate
  modified_base 17: mod_base = OTHER; note = 2'-O-methyladenosine-3'-phosphate
  modified_base 18: mod_base = OTHER; note = 2'-O-methylcytidine-3'-phosphate
  modified_base 19: mod_base = OTHER; note = 2'-O-methylcytidine-3'-phosphorothioate
  modified_base 20: mod_base = OTHER; note = 2'-O-methylguanosine-3'-phosphorothioate
  modified_base 21: mod_base = OTHER; note = 2'-O-methyladenosine
gaggaggatgattttgaccga

SEQ ID NO: 328 - RNA, 21 nt, synthetic construct
  source 1..21: mol_type = other RNA
  modified_base 1: mod_base = OTHER; note = 2'-O-methyladenosine-3'-phosphorothioate
  modified_base 2: mod_base = OTHER; note = 2'-O-methylcytidine-3'-phosphorothioate
  modified_base 3: mod_base = OTHER; note = 2'-O-methyladenosine-3'-phosphate
  modified_base 4: mod_base = OTHER; note = 2'-O-methyladenosine-3'-phosphate
  modified_base 5: mod_base = OTHER; note = 2'-O-methylguanosine-3'-phosphate
  modified_base 6: mod_base = OTHER; note = 2'-O-hexadecyl-cytidine-3'-phosphate
  modified_base 7: mod_base = OTHER; note = 2'-deoxy-2'-fluorouridine-3'-phosphate
  modified_base 8: mod_base = OTHER; note = 2'-O-methylcytidine-3'-phosphate
  modified_base 9: mod_base = OTHER; note = 2'-deoxy-2'-fluorocytidine-3'-phosphate
  modified_base 10: mod_base = OTHER; note = 2'-deoxy-2'-fluoroadenosine-3'-phosphate
  modified_base 11: mod_base = OTHER; note = 2'-deoxy-2'-fluoroadenosine-3'-phosphate
  modified_base 12: mod_base = OTHER; note = 2'-O-methyladenosine-3'-phosphate
  modified_base 13: mod_base = OTHER; note = 2'-O-methylguanosine-3'-phosphate
  modified_base 14: mod_base = OTHER; note = 2'-O-methyluridine-3'-phosphate
  modified_base 15: mod_base = OTHER; note = 2'-O-methylguanosine-3'-phosphate
  modified_base 16: mod_base = OTHER; note = 2'-O-methylguanosine-3'-phosphate
  modified_base 17: mod_base = OTHER; note = 2'-O-methyladenosine-3'-phosphate
  modified_base 18: mod_base = OTHER; note = 2'-O-methyladenosine-3'-phosphate
  modified_base 19: mod_base = OTHER; note = 2'-O-methyluridine-3'-phosphorothioate
  modified_base 20: mod_base = OTHER; note = 2'-O-methyluridine-3'-phosphorothioate
  modified_base 21: mod_base = OTHER; note = 2'-O-methyladenosine
acaagctccaaagtggaatta

SEQ ID NO: 329 - RNA, 21 nt, synthetic construct
  source 1..21: mol_type = other RNA
  modified_base 1: mod_base = OTHER; note = 2'-O-methylcytidine-3'-phosphorothioate
  modified_base 2: mod_base = OTHER; note = 2'-O-methylguanosine-3'-phosphorothioate
  modified_base 3: mod_base = OTHER; note = 2'-O-methylguanosine-3'-phosphate
  modified_base 4: mod_base = OTHER; note = 2'-O-methylcytidine-3'-phosphate
  modified_base 5: mod_base = OTHER; note = 2'-O-methyluridine-3'-phosphate
  modified_base 6: mod_base = OTHER; note = 2'-O-hexadecyl-guanosine-3'-phosphate
  modified_base 7: mod_base = OTHER; note = 2'-deoxy-2'-fluoroadenosine-3'-phosphate
  modified_base 8: mod_base = OTHER; note = 2'-O-methyluridine-3'-phosphate
  modified_base 9: mod_base = OTHER; note = 2'-deoxy-2'-fluorouridine-3'-phosphate
  modified_base 10: mod_base = OTHER; note = 2'-deoxy-2'-fluorocytidine-3'-phosphate
  modified_base 11: mod_base = OTHER; note = 2'-deoxy-2'-fluorouridine-3'-phosphate
  modified_base 12: mod_base = OTHER; note = 2'-O-methylguanosine-3'-phosphate
  modified_base 13: mod_base = OTHER; note = 2'-O-methyladenosine-3'-phosphate
  modified_base 14: mod_base = OTHER; note = 2'-O-methyladenosine-3'-phosphate
  modified_base 15: mod_base = OTHER; note = 2'-O-methylguanosine-3'-phosphate
  modified_base 16: mod_base = OTHER; note = 2'-O-methylguanosine-3'-phosphate
  modified_base 17: mod_base = OTHER; note = 2'-O-methyladenosine-3'-phosphate
  modified_base 18: mod_base = OTHER; note = 2'-O-methyladenosine-3'-phosphate
  modified_base 19: mod_base = OTHER; note = 2'-O-methylguanosine-3'-phosphorothioate
  modified_base 20: mod_base = OTHER; note = 2'-O-methyladenosine-3'-phosphorothioate
  modified_base 21: mod_base = OTHER; note = 2'-O-methyladenosine
cggctgattctgaaggaagaa

SEQ ID NO: 330 - RNA, 21 nt, synthetic construct
  source 1..21: mol_type = other RNA
  modified_base 1: mod_base = OTHER; note = 2'-O-methyladenosine-3'-phosphorothioate
  modified_base 2: mod_base = OTHER; note = 2'-O-methylguanosine-3'-phosphorothioate
  modified_base 3: mod_base = OTHER; note = 2'-O-methylcytidine-3'-phosphate
  modified_base 4: mod_base = OTHER; note = 2'-O-methyluridine-3'-phosphate
  modified_base 5: mod_base = OTHER; note = 2'-O-methylcytidine-3'-phosphate
  modified_base 6: mod_base = OTHER; note = 2'-O-hexadecyl-cytidine-3'-phosphate
  modified_base 7: mod_base = OTHER; note = 2'-deoxy-2'-fluorouridine-3'-phosphate
  modified_base 8: mod_base = OTHER; note = 2'-O-methyladenosine-3'-phosphate
  modified_base 9: mod_base = OTHER; note = 2'-deoxy-2'-fluorouridine-3'-phosphate
  modified_base 10: mod_base = OTHER; note = 2'-deoxy-2'-fluoroguanosine-3'-phosphate
  modified_base 11: mod_base = OTHER; note = 2'-deoxy-2'-fluorocytidine-3'-phosphate
  modified_base 12: mod_base = OTHER; note = 2'-O-methyladenosine-3'-phosphate
  modified_base 13: mod_base = OTHER; note = 2'-O-methylguanosine-3'-phosphate
  modified_base 14: mod_base = OTHER; note = 2'-O-methyladenosine-3'-phosphate
  modified_base 15: mod_base = OTHER; note = 2'-O-methyluridine-3'-phosphate
  modified_base 16: mod_base = OTHER; note = 2'-O-methylcytidine-3'-phosphate
  modified_base 17: mod_base = OTHER; note = 2'-O-methylcytidine-3'-phosphate
  modified_base 18: mod_base = OTHER; note = 2'-O-methylcytidine-3'-phosphate
  modified_base 19: mod_base = OTHER; note = 2'-O-methyluridine-3'-phosphorothioate
  modified_base 20: mod_base = OTHER; note = 2'-O-methylguanosine-3'-phosphorothioate
  modified_base 21: mod_base = OTHER; note = 2'-O-methyladenosine
agctcctatgcagatccctga

SEQ ID NO: 331 - RNA, 21 nt, synthetic construct
  source 1..21: mol_type = other RNA
  modified_base 1: mod_base = OTHER; note = 2'-O-methyluridine-3'-phosphorothioate
  modified_base 2: mod_base = OTHER; note = 2'-O-methylguanosine-3'-phosphorothioate
  modified_base 3: mod_base = OTHER; note = 2'-O-methylguanosine-3'-phosphate
  modified_base 4: mod_base = OTHER; note = 2'-O-methylcytidine-3'-phosphate
  modified_base 5: mod_base = OTHER; note = 2'-O-methyluridine-3'-phosphate
  modified_base 6: mod_base = OTHER; note = 2'-O-hexadecyl-adenosine-3'-phosphate
  modified_base 7: mod_base = OTHER; note = 2'-deoxy-2'-fluorouridine-3'-phosphate
  modified_base 8: mod_base = OTHER; note = 2'-O-methylguanosine-3'-phosphate
  modified_base 9: mod_base = OTHER; note = 2'-deoxy-2'-fluoroadenosine-3'-phosphate
  modified_base 10: mod_base = OTHER; note = 2'-deoxy-2'-fluoroguanosine-3'-phosphate
  modified_base 11: mod_base = OTHER; note = 2'-deoxy-2'-fluoroadenosine-3'-phosphate
  modified_base 12: mod_base = OTHER; note = 2'-O-methyluridine-3'-phosphate
  modified_base 13: mod_base = OTHER; note = 2'-O-methylguanosine-3'-phosphate
  modified_base 14: mod_base = OTHER; note = 2'-O-methyluridine-3'-phosphate
  modified_base 15: mod_base = OTHER; note = 2'-O-methylcytidine-3'-phosphate
  modified_base 16: mod_base = OTHER; note = 2'-O-methylcytidine-3'-phosphate
  modified_base 17: mod_base = OTHER; note = 2'-O-methylcytidine-3'-phosphate
  modified_base 18: mod_base = OTHER; note = 2'-O-methyluridine-3'-phosphate
  modified_base 19: mod_base = OTHER; note = 2'-O-methylcytidine-3'-phosphorothioate
  modified_base 20: mod_base = OTHER; note = 2'-O-methyladenosine-3'-phosphorothioate
  modified_base 21: mod_base = OTHER; note = 2'-O-methyladenosine
tggctatgagatgtccctcaa

SEQ ID NO: 332 - RNA, 21 nt, synthetic construct
  source 1..21: mol_type = other RNA
  modified_base 1: mod_base = OTHER; note = 2'-O-methyluridine-3'-phosphorothioate
  modified_base 2: mod_base = OTHER; note = 2'-O-methylcytidine-3'-phosphorothioate
  modified_base 3: mod_base = OTHER; note = 2'-O-methylcytidine-3'-phosphate
  modified_base 4: mod_base = OTHER; note = 2'-O-methyluridine-3'-phosphate
  modified_base 5: mod_base = OTHER; note = 2'-O-methylcytidine-3'-phosphate
  modified_base 6: mod_base = OTHER; note = 2'-O-hexadecyl-uridine-3'-phosphate
  modified_base 7: mod_base = OTHER; note = 2'-deoxy-2'-fluorocytidine-3'-phosphate
  modified_base 8: mod_base = OTHER; note = 2'-O-methyladenosine-3'-phosphate
  modified_base 9: mod_base = OTHER; note = 2'-deoxy-2'-fluorouridine-3'-phosphate
  modified_base 10: mod_base = OTHER; note = 2'-deoxy-2'-fluorocytidine-3'-phosphate
  modified_base 11: mod_base = OTHER; note = 2'-deoxy-2'-fluorouridine-3'-phosphate
  modified_base 12: mod_base = OTHER; note = 2'-O-methylcytidine-3'-phosphate
  modified_base 13: mod_base = OTHER; note = 2'-O-methylcytidine-3'-phosphate
  modified_base 14: mod_base = OTHER; note = 2'-O-methyladenosine-3'-phosphate
  modified_base 15: mod_base = OTHER; note = 2'-O-methyladenosine-3'-phosphate
  modified_base 16: mod_base = OTHER; note = 2'-O-methyladenosine-3'-phosphate
  modified_base 17: mod_base = OTHER; note = 2'-O-methyluridine-3'-phosphate
  modified_base 18: mod_base = OTHER; note = 2'-O-methylcytidine-3'-phosphate
  modified_base 19: mod_base = OTHER; note = 2'-O-methyluridine-3'-phosphorothioate
  modified_base 20: mod_base = OTHER; note = 2'-O-methylguanosine-3'-phosphorothioate
  modified_base 21: mod_base = OTHER; note = 2'-O-methyladenosine
tcctctcatctccaaatctga

SEQ ID NO: 333 - RNA, 21 nt, synthetic construct
  source 1..21: mol_type = other RNA
  modified_base 1: mod_base = OTHER; note = 2'-O-methylguanosine-3'-phosphorothioate
  modified_base 2: mod_base = OTHER; note = 2'-O-methylcytidine-3'-phosphorothioate
  modified_base 3: mod_base = OTHER; note = 2'-O-methylcytidine-3'-phosphate
  modified_base 4: mod_base = OTHER; note = 2'-O-methyluridine-3'-phosphate
  modified_base 5: mod_base = OTHER; note = 2'-O-methyladenosine-3'-phosphate
  modified_base 6: mod_base = OTHER; note = 2'-O-hexadecyl-cytidine-3'-phosphate
  modified_base 7: mod_base = OTHER; note = 2'-deoxy-2'-fluorocytidine-3'-phosphate
  modified_base 8: mod_base = OTHER; note = 2'-O-methylguanosine-3'-phosphate
  modified_base 9: mod_base = OTHER; note = 2'-deoxy-2'-fluoroadenosine-3'-phosphate
  modified_base 10: mod_base = OTHER; note = 2'-deoxy-2'-fluoroadenosine-3'-phosphate
  modified_base 11: mod_base = OTHER; note = 2'-deoxy-2'-fluoroguanosine-3'-phosphate
  modified_base 12: mod_base = OTHER; note = 2'-O-methyladenosine-3'-phosphate
  modified_base 13: mod_base = OTHER; note = 2'-O-methyladenosine-3'-phosphate
  modified_base 14: mod_base = OTHER; note = 2'-O-methyladenosine-3'-phosphate
  modified_base 15: mod_base = OTHER; note = 2'-O-methyluridine-3'-phosphate
  modified_base 16: mod_base = OTHER; note = 2'-O-methylguanosine-3'-phosphate
  modified_base 17: mod_base = OTHER; note = 2'-O-methylguanosine-3'-phosphate
  modified_base 18: mod_base = OTHER; note = 2'-O-methylguanosine-3'-phosphate
  modified_base 19: mod_base = OTHER; note = 2'-O-methylcytidine-3'-phosphorothioate
  modified_base 20: mod_base = OTHER; note = 2'-O-methyluridine-3'-phosphorothioate
  modified_base 21: mod_base = OTHER; note = 2'-O-methyladenosine
gcctaccgaagaaatgggcta

SEQ ID NO: 334 - RNA, 21 nt, synthetic construct
  source 1..21: mol_type = other RNA
  modified_base 1: mod_base = OTHER; note = 2'-O-methylcytidine-3'-phosphorothioate
  modified_base 2: mod_base = OTHER; note = 2'-O-methyluridine-3'-phosphorothioate
  modified_base 3: mod_base = OTHER; note = 2'-O-methylcytidine-3'-phosphate
  modified_base 4: mod_base = OTHER; note = 2'-O-methyluridine-3'-phosphate
  modified_base 5: mod_base = OTHER; note = 2'-O-methyluridine-3'-phosphate
  modified_base 6: mod_base = OTHER; note = 2'-O-hexadecyl-cytidine-3'-phosphate
  modified_base 7: mod_base = OTHER; note = 2'-deoxy-2'-fluorocytidine-3'-phosphate
  modified_base 8: mod_base = OTHER; note = 2'-O-methyladenosine-3'-phosphate
  modified_base 9: mod_base = OTHER; note = 2'-deoxy-2'-fluorocytidine-3'-phosphate
  modified_base 10: mod_base = OTHER; note = 2'-deoxy-2'-fluorouridine-3'-phosphate
  modified_base 11: mod_base = OTHER; note = 2'-deoxy-2'-fluoroadenosine-3'-phosphate
  modified_base 12: mod_base = OTHER; note = 2'-O-methylcytidine-3'-phosphate
  modified_base 13: mod_base = OTHER; note = 2'-O-methylguanosine-3'-phosphate
  modified_base 14: mod_base = OTHER; note = 2'-O-methyladenosine-3'-phosphate
  modified_base 15: mod_base = OTHER; note = 2'-O-methylcytidine-3'-phosphate
  modified_base 16: mod_base = OTHER; note = 2'-O-methyladenosine-3'-phosphate
  modified_base 17: mod_base = OTHER; note = 2'-O-methylguanosine-3'-phosphate
  modified_base 18: mod_base = OTHER; note = 2'-O-methylcytidine-3'-phosphate
  modified_base 19: mod_base = OTHER; note = 2'-O-methyladenosine-3'-phosphorothioate
  modified_base 20: mod_base = OTHER; note = 2'-O-methyluridine-3'-phosphorothioate
  modified_base 21: mod_base = OTHER; note = 2'-O-methyladenosine
ctcttccactacgacagcata

SEQ ID NO: 335 - RNA, 21 nt, synthetic construct
  source 1..21: mol_type = other RNA
  modified_base 1: mod_base = OTHER; note = 2'-O-methyladenosine-3'-phosphorothioate
  modified_base 2: mod_base = OTHER; note = 2'-O-methylguanosine-3'-phosphorothioate
  modified_base 3: mod_base = OTHER; note = 2'-O-methylcytidine-3'-phosphate
  modified_base 4: mod_base = OTHER; note = 2'-O-methyladenosine-3'-phosphate
  modified_base 5: mod_base = OTHER; note = 2'-O-methyluridine-3'-phosphate
  modified_base 6: mod_base = OTHER; note = 2'-O-hexadecyl-guanosine-3'-phosphate
  modified_base 7: mod_base = OTHER; note = 2'-deoxy-2'-fluoroadenosine-3'-phosphate
  modified_base 8: mod_base = OTHER; note = 2'-O-methyladenosine-3'-phosphate
  modified_base 9: mod_base = OTHER; note = 2'-deoxy-2'-fluorocytidine-3'-phosphate
  modified_base 10: mod_base = OTHER; note = 2'-deoxy-2'-fluoroguanosine-3'-phosphate
  modified_base 11: mod_base = OTHER; note = 2'-deoxy-2'-fluorocytidine-3'-phosphate
  modified_base 12: mod_base = OTHER; note = 2'-O-methyladenosine-3'-phosphate
  modified_base 13: mod_base = OTHER; note = 2'-O-methylguanosine-3'-phosphate
  modified_base 14: mod_base = OTHER; note = 2'-O-methyluridine-3'-phosphate
  modified_base 15: mod_base = OTHER; note = 2'-O-methylcytidine-3'-phosphate
  modified_base 16: mod_base = OTHER; note = 2'-O-methyladenosine-3'-phosphate
  modified_base 17: mod_base = OTHER; note = 2'-O-methyladenosine-3'-phosphate
  modified_base 18: mod_base = OTHER; note = 2'-O-methylcytidine-3'-phosphate
  modified_base 19: mod_base = OTHER; note = 2'-O-methyluridine-3'-phosphorothioate
  modified_base 20: mod_base = OTHER; note = 2'-O-methylguanosine-3'-phosphorothioate
  modified_base 21: mod_base = OTHER; note = 2'-O-methyladenosine
agcatgaacgcagtcaactga

SEQ ID NO: 336 - RNA, 21 nt, synthetic construct
  source 1..21: mol_type = other RNA
  modified_base 1: mod_base = OTHER; note = 2'-O-methyladenosine-3'-phosphorothioate
  modified_base 2: mod_base = OTHER; note = 2'-O-methylcytidine-3'-phosphorothioate
  modified_base 3: mod_base = OTHER; note = 2'-O-methyladenosine-3'-phosphate
  modified_base 4: mod_base = OTHER; note = 2'-O-methyladenosine-3'-phosphate
  modified_base 5: mod_base = OTHER; note = 2'-O-methylguanosine-3'-phosphate
  modified_base 6: mod_base = OTHER; note = 2'-O-hexadecyl-adenosine-3'-phosphate
  modified_base 7: mod_base = OTHER; note = 2'-deoxy-2'-fluorouridine-3'-phosphate
  modified_base 8: mod_base = OTHER; note = 2'-O-methylcytidine-3'-phosphate
  modified_base 9: mod_base = OTHER; note = 2'-deoxy-2'-fluorouridine-3'-phosphate
  modified_base 10: mod_base = OTHER; note = 2'-deoxy-2'-fluoroadenosine-3'-phosphate
  modified_base 11: mod_base = OTHER; note = 2'-deoxy-2'-fluorocytidine-3'-phosphate
  modified_base 12: mod_base = OTHER; note = 2'-O-methylcytidine-3'-phosphate
  modified_base 13: mod_base = OTHER; note = 2'-O-methylcytidine-3'-phosphate
  modified_base 14: mod_base = OTHER; note = 2'-O-methyluridine-3'-phosphate
  modified_base 15: mod_base = OTHER; note = 2'-O-methyluridine-3'-phosphate
  modified_base 16: mod_base = OTHER; note = 2'-O-methyladenosine-3'-phosphate
  modified_base 17: mod_base = OTHER; note = 2'-O-methyluridine-3'-phosphate
  modified_base 18: mod_base = OTHER; note = 2'-O-methylguanosine-3'-phosphate
  modified_base 19: mod_base = OTHER; note = 2'-O-methyladenosine-3'-phosphorothioate
  modified_base 20: mod_base = OTHER; note = 2'-O-methyladenosine-3'-phosphorothioate
  modified_base 21: mod_base = OTHER; note = 2'-O-methyladenosine
acaagatctacccttatgaaa

SEQ ID NO: 337 - RNA, 21 nt, synthetic construct
  source 1..21: mol_type = other RNA
  modified_base 1: mod_base = OTHER; note = 2'-O-methyluridine-3'-phosphorothioate
  modified_base 2: mod_base = OTHER; note = 2'-O-methylguanosine-3'-phosphorothioate
  modified_base 3: mod_base = OTHER; note = 2'-O-methylguanosine-3'-phosphate
  modified_base 4: mod_base = OTHER; note = 2'-O-methyluridine-3'-phosphate
  modified_base 5: mod_base = OTHER; note = 2'-O-methylguanosine-3'-phosphate
  modified_base 6: mod_base = OTHER; note = 2'-O-hexadecyl-adenosine-3'-phosphate
  modified_base 7: mod_base = OTHER; note = 2'-deoxy-2'-fluorocytidine-3'-phosphate
  modified_base 8: mod_base = OTHER; note = 2'-O-methyluridine-3'-phosphate
  modified_base 9: mod_base = OTHER; note = 2'-deoxy-2'-fluoroadenosine-3'-phosphate
  modified_base 10: mod_base = OTHER; note = 2'-deoxy-2'-fluorocytidine-3'-phosphate
  modified_base 11: mod_base = OTHER; note = 2'-deoxy-2'-fluoroadenosine-3'-phosphate
  modified_base 12: mod_base = OTHER; note = 2'-O-methyladenosine-3'-phosphate
  modified_base 13: mod_base = OTHER; note = 2'-O-methylguanosine-3'-phosphate
  modified_base 14: mod_base = OTHER; note = 2'-O-methyladenosine-3'-phosphate
  modified_base 15: mod_base = OTHER; note = 2'-O-methylguanosine-3'-phosphate
  modified_base 16: mod_base = OTHER; note = 2'-O-methylguanosine-3'-phosphate
  modified_base 17: mod_base = OTHER; note = 2'-O-methyladenosine-3'-phosphate
  modified_base 18: mod_base = OTHER; note = 2'-O-methyladenosine-3'-phosphate
  modified_base 19: mod_base = OTHER; note = 2'-O-methylguanosine-3'-phosphorothioate
  modified_base 20: mod_base = OTHER; note = 2'-O-methyladenosine-3'-phosphorothioate
  modified_base 21: mod_base = OTHER; note = 2'-O-methyladenosine
tggtgactacaagaggaagaa

SEQ ID NO: 338 - RNA, 21 nt, synthetic construct
  source 1..21: mol_type = other RNA
  modified_base 1: mod_base = OTHER; note = 2'-O-methylguanosine-3'-phosphorothioate
  modified_base 2: mod_base = OTHER; note = 2'-O-methylcytidine-3'-phosphorothioate
  modified_base 3: mod_base = OTHER; note = 2'-O-methylcytidine-3'-phosphate
  modified_base 4: mod_base = OTHER; note = 2'-O-methylcytidine-3'-phosphate
  modified_base 5: mod_base = OTHER; note = 2'-O-methyladenosine-3'-phosphate
  modified_base 6: mod_base = OTHER; note = 2'-O-hexadecyl-adenosine-3'-phosphate
  modified_base 7: mod_base = OTHER; note = 2'-deoxy-2'-fluoroguanosine-3'-phosphate
  modified_base 8: mod_base = OTHER; note = 2'-O-methylguanosine-3'-phosphate
  modified_base 9: mod_base = OTHER; note = 2'-deoxy-2'-fluoroadenosine-3'-phosphate
  modified_base 10: mod_base = OTHER; note = 2'-deoxy-2'-fluorouridine-3'-phosphate
  modified_base 11: mod_base = OTHER; note = 2'-deoxy-2'-fluoroguanosine-3'-phosphate
  modified_base 12: mod_base = OTHER; note = 2'-O-methyluridine-3'-phosphate
  modified_base 13: mod_base = OTHER; note = 2'-O-methyladenosine-3'-phosphate
  modified_base 14: mod_base = OTHER; note = 2'-O-methylguanosine-3'-phosphate
  modified_base 15: mod_base = OTHER; note = 2'-O-methyladenosine-3'-phosphate
  modified_base 16: mod_base = OTHER; note = 2'-O-methylcytidine-3'-phosphate
  modified_base 17: mod_base = OTHER; note = 2'-O-methyladenosine-3'-phosphate
  modified_base 18: mod_base = OTHER; note = 2'-O-methylguanosine-3'-phosphate
  modified_base 19: mod_base = OTHER; note = 2'-O-methylguanosine-3'-phosphorothioate
  modified_base 20: mod_base = OTHER; note = 2'-O-methyladenosine-3'-phosphorothioate
  modified_base 21: mod_base = OTHER; note = 2'-O-methyladenosine
gcccaaggatgtagacaggaa

SEQ ID NO: 339 - RNA, 21 nt, synthetic construct
  source 1..21: mol_type = other RNA
  modified_base 1: mod_base = OTHER; note = 2'-O-methyluridine-3'-phosphorothioate
  modified_base 2: mod_base = OTHER; note = 2'-O-methyluridine-3'-phosphorothioate
  modified_base 3: mod_base = OTHER; note = 2'-O-methylcytidine-3'-phosphate
  modified_base 4: mod_base = OTHER; note = 2'-O-methyluridine-3'-phosphate
  modified_base 5: mod_base = OTHER; note = 2'-O-methyladenosine-3'-phosphate
  modified_base 6: mod_base = OTHER; note = 2'-O-hexadecyl-cytidine-3'-phosphate
  modified_base 7: mod_base = OTHER; note = 2'-deoxy-2'-fluorocytidine-3'-phosphate
  modified_base 8: mod_base = OTHER; note = 2'-O-methyladenosine-3'-phosphate
  modified_base 9: mod_base = OTHER; note = 2'-deoxy-2'-fluoroadenosine-3'-phosphate
  modified_base 10: mod_base = OTHER; note = 2'-deoxy-2'-fluoroguanosine-3'-phosphate
  modified_base 11: mod_base = OTHER; note = 2'-deoxy-2'-fluorouridine-3'-phosphate
  modified_base 12: mod_base = OTHER; note = 2'-O-methylcytidine-3'-phosphate
  modified_base 13: mod_base = OTHER; note = 2'-O-methyluridine-3'-phosphate
  modified_base 14: mod_base = OTHER; note = 2'-O-methyluridine-3'-phosphate
  modified_base 15: mod_base = OTHER; note = 2'-O-methyluridine-3'-phosphate
  modified_base 16: mod_base = OTHER; note = 2'-O-methylguanosine-3'-phosphate
  modified_base 17: mod_base = OTHER; note = 2'-O-methylguanosine-3'-phosphate
  modified_base 18: mod_base = OTHER; note = 2'-O-methylcytidine-3'-phosphate
  modified_base 19: mod_base = OTHER; note = 2'-O-methyladenosine-3'-phosphorothioate
  modified_base 20: mod_base = OTHER; note = 2'-O-methyluridine-3'-phosphorothioate
  modified_base 21: mod_base = OTHER; note = 2'-O-methyladenosine
ttctaccaagtctttggcata

SEQ ID NO: 340 - RNA, 21 nt, synthetic construct
  source 1..21: mol_type = other RNA
  modified_base 1: mod_base = OTHER; note = 2'-O-methyladenosine-3'-phosphorothioate
  modified_base 2: mod_base = OTHER; note = 2'-O-methyluridine-3'-phosphorothioate
  modified_base 3: mod_base = OTHER; note = 2'-O-methylguanosine-3'-phosphate
  modified_base 4: mod_base = OTHER; note = 2'-O-methyladenosine-3'-phosphate
  modified_base 5: mod_base = OTHER; note = 2'-O-methylcytidine-3'-phosphate
  modified_base 6: mod_base = OTHER; note = 2'-O-hexadecyl-cytidine-3'-phosphate
  modified_base 7: mod_base = OTHER; note = 2'-deoxy-2'-fluoroadenosine-3'-phosphate
  modified_base 8: mod_base = OTHER; note = 2'-O-methyluridine-3'-phosphate
  modified_base 9: mod_base = OTHER; note = 2'-deoxy-2'-fluorocytidine-3'-phosphate
  modified_base 10: mod_base = OTHER; note = 2'-deoxy-2'-fluorouridine-3'-phosphate
  modified_base 11: mod_base = OTHER; note = 2'-deoxy-2'-fluorocytidine-3'-phosphate
  modified_base 12: mod_base = OTHER; note = 2'-O-methyluridine-3'-phosphate
  modified_base 13: mod_base = OTHER; note = 2'-O-methylguanosine-3'-phosphate
  modified_base 14: mod_base = OTHER; note = 2'-O-methyladenosine-3'-phosphate
  modified_base 15: mod_base = OTHER; note = 2'-O-methylguanosine-3'-phosphate
  modified_base 16: mod_base = OTHER; note = 2'-O-methyluridine-3'-phosphate
  modified_base 17: mod_base = OTHER; note = 2'-O-methyluridine-3'-phosphate
  modified_base 18: mod_base = OTHER; note = 2'-O-methyluridine-3'-phosphate
  modified_base 19: mod_base = OTHER; note = 2'-O-methylguanosine-3'-phosphorothioate
  modified_base 20: mod_base = OTHER; note = 2'-O-methyladenosine-3'-phosphorothioate
  modified_base 21: mod_base = OTHER; note = 2'-O-methyladenosine
atgaccatctctgagtttgaa

SEQ ID NO: 341 - RNA, 21 nt, synthetic construct
  source 1..21: mol_type = other RNA
  modified_base 1: mod_base = OTHER; note = 2'-O-methyladenosine-3'-phosphorothioate
  modified_base 2: mod_base = OTHER; note = 2'-O-methyladenosine-3'-phosphorothioate
  modified_base 3: mod_base = OTHER; note = 2'-O-methyluridine-3'-phosphate
  modified_base 4: mod_base = OTHER; note = 2'-O-methylguanosine-3'-phosphate
  modified_base 5: mod_base = OTHER; note = 2'-O-methyladenosine-3'-phosphate
  modified_base 6: mod_base = OTHER; note = 2'-O-hexadecyl-adenosine-3'-phosphate
  modified_base 7: mod_base = OTHER; note = 2'-deoxy-2'-fluorocytidine-3'-phosphate
  modified_base 8: mod_base = OTHER; note = 2'-O-methyluridine-3'-phosphate
  modified_base 9: mod_base = OTHER; note = 2'-deoxy-2'-fluoroguanosine-3'-phosphate
  modified_base 10: mod_base = OTHER; note = 2'-deoxy-2'-fluoroadenosine-3'-phosphate
  modified_base 11: mod_base = OTHER; note = 2'-deoxy-2'-fluoroadenosine-3'-phosphate
  modified_base 12: mod_base = OTHER; note = 2'-O-methylguanosine-3'-phosphate
  modified_base 13: mod_base = OTHER; note = 2'-O-methyladenosine-3'-phosphate
  modified_base 14: mod_base = OTHER; note = 2'-O-methyladenosine-3'-phosphate
  modified_base 15: mod_base = OTHER; note = 2'-O-methylguanosine-3'-phosphate
  modified_base 16: mod_base = OTHER; note = 2'-O-methylcytidine-3'-phosphate
  modified_base 17: mod_base = OTHER; note = 2'-O-methyladenosine-3'-phosphate
  modified_base 18: mod_base = OTHER; note = 2'-O-methyladenosine-3'-phosphate
  modified_base 19: mod_base = OTHER; note = 2'-O-methylguanosine-3'-phosphorothioate
  modified_base 20: mod_base = OTHER; note = 2'-O-methylcytidine-3'-phosphorothioate
  modified_base 21: mod_base = OTHER; note = 2'-O-methyladenosine
aatgaactgaagaagcaagca

SEQ ID NO: 342 - RNA, 21 nt, synthetic construct
  source 1..21: mol_type = other RNA
  modified_base 1: mod_base = OTHER; note = 2'-O-methyladenosine-3'-phosphorothioate
  modified_base 2: mod_base = OTHER; note = 2'-O-methylguanosine-3'-phosphorothioate
  modified_base 3: mod_base = OTHER; note = 2'-O-methylguanosine-3'-phosphate
  modified_base 4: mod_base = OTHER; note = 2'-O-methylcytidine-3'-phosphate
  modified_base 5: mod_base = OTHER; note = 2'-O-methyluridine-3'-phosphate
  modified_base 6: mod_base = OTHER; note = 2'-O-hexadecyl-cytidine-3'-phosphate
  modified_base 7: mod_base = OTHER; note = 2'-deoxy-2'-fluorouridine-3'-phosphate
  modified_base 8: mod_base = OTHER; note = 2'-O-methyladenosine-3'-phosphate
  modified_base 9: mod_base = OTHER; note = 2'-deoxy-2'-fluorouridine-3'-phosphate
  modified_base 10: mod_base = OTHER; note = 2'-deoxy-2'-fluoroadenosine-3'-phosphate
  modified_base 11: mod_base = OTHER; note = 2'-deoxy-2'-fluoroadenosine-3'-phosphate
  modified_base 12: mod_base = OTHER; note = 2'-O-methyladenosine-3'-phosphate
  modified_base 13: mod_base = OTHER; note = 2'-O-methyluridine-3'-phosphate
  modified_base 14: mod_base = OTHER; note = 2'-O-methyladenosine-3'-phosphate
  modified_base 15: mod_base = OTHER; note = 2'-O-methyluridine-3'-phosphate
  modified_base 16: mod_base = OTHER; note = 2'-O-methyladenosine-3'-phosphate
  modified_base 17: mod_base = OTHER; note = 2'-O-methyluridine-3'-phosphate
  modified_base 18: mod_base = OTHER; note = 2'-O-methyladenosine-3'-phosphate
  modified_base 19: mod_base = OTHER; note = 2'-O-methyluridine-3'-phosphorothioate
  modified_base 20: mod_base = OTHER; note = 2'-O-methylguanosine-3'-phosphorothioate
  modified_base 21: mod_base = OTHER; note = 2'-O-methyladenosine
aggctctataaatatatatga

SEQ ID NO: 343 - RNA, 21 nt, synthetic construct
  source 1..21: mol_type = other RNA
  modified_base 1: mod_base = OTHER; note = 2'-O-methyladenosine-3'-phosphorothioate
  modified_base 2: mod_base = OTHER; note = 2'-O-methyluridine-3'-phosphorothioate
  modified_base 3: mod_base = OTHER; note = 2'-O-methylguanosine-3'-phosphate
  modified_base 4: mod_base = OTHER; note = 2'-O-methyluridine-3'-phosphate
  modified_base 5: mod_base = OTHER; note = 2'-O-methyladenosine-3'-phosphate
  modified_base 6: mod_base = OTHER; note = 2'-O-hexadecyl-adenosine-3'-phosphate
  modified_base 7: mod_base = OTHER; note = 2'-deoxy-2'-fluoroadenosine-3'-phosphate
  modified_base 8: mod_base = OTHER; note = 2'-O-methyladenosine-3'-phosphate
  modified_base 9: mod_base = OTHER; note = 2'-deoxy-2'-fluorouridine-3'-phosphate
  modified_base 10: mod_base = OTHER; note = 2'-deoxy-2'-fluorocytidine-3'-phosphate
  modified_base 11: mod_base = OTHER; note = 2'-deoxy-2'-fluorouridine-3'-phosphate
  modified_base 12: mod_base = OTHER; note = 2'-O-methylcytidine-3'-phosphate
  modified_base 13: mod_base = OTHER; note = 2'-O-methyluridine-3'-phosphate
  modified_base 14: mod_base = OTHER; note = 2'-O-methylcytidine-3'-phosphate
  modified_base 15: mod_base = OTHER; note = 2'-O-methyluridine-3'-phosphate
  modified_base 16: mod_base = OTHER; note = 2'-O-methyladenosine-3'-phosphate
  modified_base 17: mod_base = OTHER; note = 2'-O-methylcytidine-3'-phosphate
  modified_base 18: mod_base = OTHER; note = 2'-O-methyluridine-3'-phosphate
  modified_base 19: mod_base = OTHER; note = 2'-O-methylguanosine-3'-phosphorothioate
  modified_base 20: mod_base = OTHER; note = 2'-O-methyladenosine-3'-phosphorothioate
  modified_base 21: mod_base = OTHER; note = 2'-O-methyladenosine
atgtaaaatctctctactgaa

SEQ ID NO: 344 - RNA, 21 nt, synthetic construct
  source 1..21: mol_type = other RNA
  modified_base 1: mod_base = OTHER; note = 2'-O-methylcytidine-3'-phosphorothioate
  modified_base 2: mod_base = OTHER; note = 2'-O-methylguanosine-3'-phosphorothioate
  modified_base 3: mod_base = OTHER; note = 2'-O-methylguanosine-3'-phosphate
  modified_base 4: mod_base = OTHER; note = 2'-O-methyluridine-3'-phosphate
  modified_base 5: mod_base = OTHER; note = 2'-O-methyladenosine-3'-phosphate
  modified_base 6: mod_base = OTHER; note = 2'-O-hexadecyl-uridine-3'-phosphate
  modified_base 7: mod_base = OTHER; note = 2'-deoxy-2'-fluoroadenosine-3'-phosphate
  modified_base 8: mod_base = OTHER; note = 2'-O-methyladenosine-3'-phosphate
  modified_base 9: mod_base = OTHER; note = 2'-deoxy-2'-fluorouridine-3'-phosphate
  modified_base 10: mod_base = OTHER; note = 2'-deoxy-2'-fluorocytidine-3'-phosphate
  modified_base 11: mod_base = OTHER; note = 2'-deoxy-2'-fluorocytidine-3'-phosphate
  modified_base 12: mod_base = OTHER; note = 2'-O-methyluridine-3'-phosphate
  modified_base 13: mod_base = OTHER; note = 2'-O-methylcytidine-3'-phosphate
  modified_base 14: mod_base = OTHER; note = 2'-O-methyluridine-3'-phosphate
  modified_base 15: mod_base = OTHER; note = 2'-O-methylcytidine-3'-phosphate
  modified_base 16: mod_base = OTHER; note = 2'-O-methyluridine-3'-phosphate
  modified_base 17: mod_base = OTHER; note = 2'-O-methyluridine-3'-phosphate
  modified_base 18: mod_base = OTHER; note = 2'-O-methylguanosine-3'-phosphate
  modified_base 19: mod_base = OTHER; note = 2'-O-methyluridine-3'-phosphorothioate
  modified_base 20: mod_base = OTHER; note = 2'-O-methylguanosine-3'-phosphorothioate
  modified_base 21: mod_base = OTHER; note = 2'-O-methyladenosine
cggtataatcctctcttgtga

SEQ ID NO: 345 - RNA, 21 nt, synthetic construct
  source 1..21: mol_type = other RNA
  modified_base 1: mod_base = OTHER; note = 2'-O-methyluridine-3'-phosphorothioate
  modified_base 2: mod_base = OTHER; note = 2'-O-methylguanosine-3'-phosphorothioate
  modified_base 3: mod_base = OTHER; note = 2'-O-methylcytidine-3'-phosphate
  modified_base 4: mod_base = OTHER; note = 2'-O-methylcytidine-3'-phosphate
  modified_base 5: mod_base = OTHER; note = 2'-O-methyladenosine-3'-phosphate
  modified_base 6: mod_base = OTHER; note = 2'-O-hexadecyl-uridine-3'-phosphate
  modified_base 7: mod_base = OTHER; note = 2'-deoxy-2'-fluoroguanosine-3'-phosphate
  modified_base 8: mod_base = OTHER; note = 2'-O-methyladenosine-3'-phosphate
  modified_base 9: mod_base = OTHER; note = 2'-deoxy-2'-fluoroguanosine-3'-phosphate
  modified_base 10: mod_base = OTHER; note = 2'-deoxy-2'-fluoroadenosine-3'-phosphate
  modified_base 11: mod_base = OTHER; note = 2'-deoxy-2'-fluorocytidine-3'-phosphate
  modified_base 12: mod_base = OTHER; note = 2'-O-methyluridine-3'-phosphate
  modified_base 13: mod_base = OTHER; note = 2'-O-methyluridine-3'-phosphate
  modified_base 14: mod_base = OTHER; note = 2'-O-methylguanosine-3'-phosphate
  modified_base 15: mod_base = OTHER; note = 2'-O-methylcytidine-3'-phosphate
  modified_base 16: mod_base = OTHER; note = 2'-O-methyluridine-3'-phosphate
  modified_base 17: mod_base = OTHER; note = 2'-O-methyluridine-3'-phosphate
  modified_base 18: mod_base = OTHER; note = 2'-O-methyluridine-3'-phosphate
  modified_base 19: mod_base = OTHER; note = 2'-O-methyluridine-3'-phosphorothioate
  modified_base 20: mod_base = OTHER; note = 2'-O-methylcytidine-3'-phosphorothioate
  modified_base 21: mod_base = OTHER; note = 2'-O-methyladenosine
tgccatgagacttgcttttca

SEQ ID NO: 346 - RNA, 21 nt, synthetic construct
  source 1..21: mol_type = other RNA
  modified_base 1: mod_base = OTHER; note = 2'-O-methyluridine-3'-phosphorothioate
  modified_base 2: mod_base = OTHER; note = 2'-O-methyluridine-3'-phosphorothioate
  modified_base 3: mod_base = OTHER; note = 2'-O-methyluridine-3'-phosphate
  modified_base 4: mod_base = OTHER; note = 2'-O-methyluridine-3'-phosphate
  modified_base 5: mod_base = OTHER; note = 2'-O-methylcytidine-3'-phosphate
  modified_base 6: mod_base = OTHER; note = 2'-O-hexadecyl-uridine-3'-phosphate
  modified_base 7: mod_base = OTHER; note = 2'-deoxy-2'-fluoroguanosine-3'-phosphate
  modified_base 8: mod_base = OTHER; note = 2'-O-methyluridine-3'-phosphate
  modified_base 9: mod_base = OTHER; note = 2'-deoxy-2'-fluoroadenosine-3'-phosphate
  modified_base 10: mod_base = OTHER; note = 2'-deoxy-2'-fluorocytidine-3'-phosphate
  modified_base 11: mod_base = OTHER; note = 2'-deoxy-2'-fluorouridine-3'-phosphate
  modified_base 12: mod_base = OTHER; note = 2'-O-methylguanosine-3'-phosphate
  modified_base 13: mod_base = OTHER; note = 2'-O-methyluridine-3'-phosphate
  modified_base 14: mod_base = OTHER; note = 2'-O-methylcytidine-3'-phosphate
  modified_base 15: mod_base = OTHER; note = 2'-O-methyladenosine-3'-phosphate
  modified_base 16: mod_base = OTHER; note = 2'-O-methylguanosine-3'-phosphate
  modified_base 17: mod_base = OTHER; note = 2'-O-methylguanosine-3'-phosphate
  modified_base 18: mod_base = OTHER; note = 2'-O-methylcytidine-3'-phosphate
  modified_base 19: mod_base = OTHER; note = 2'-O-methyladenosine-3'-phosphorothioate
  modified_base 20: mod_base = OTHER; note = 2'-O-methyladenosine-3'-phosphorothioate
  modified_base 21: mod_base = OTHER; note = 2'-O-methyladenosine
ttttctgtactgtcaggcaaa

SEQ ID NO: 347 - RNA, 21 nt, synthetic construct
  source 1..21: mol_type = other RNA
  modified_base 1: mod_base = OTHER; note = 2'-O-methylguanosine-3'-phosphorothioate
  modified_base 2: mod_base = OTHER; note = 2'-O-methyluridine-3'-phosphorothioate
  modified_base 3: mod_base = OTHER; note = 2'-O-methylcytidine-3'-phosphate
  modified_base 4: mod_base = OTHER; note = 2'-O-methyladenosine-3'-phosphate
  modified_base 5: mod_base = OTHER; note = 2'-O-methyluridine-3'-phosphate
  modified_base 6: mod_base = OTHER; note = 2'-O-hexadecyl-cytidine-3'-phosphate
  modified_base 7: mod_base = OTHER; note = 2'-deoxy-2'-fluoroguanosine-3'-phosphate
  modified_base 8: mod_base = OTHER; note = 2'-O-methyladenosine-3'-phosphate
  modified_base 9: mod_base = OTHER; note = 2'-deoxy-2'-fluoroguanosine-3'-phosphate
  modified_base 10: mod_base = OTHER; note = 2'-deoxy-2'-fluoroadenosine-3'-phosphate
  modified_base 11: mod_base = OTHER; note = 2'-deoxy-2'-fluorouridine-3'-phosphate
  modified_base 12: mod_base = OTHER; note = 2'-O-methyladenosine-3'-phosphate
  modified_base 13: mod_base = OTHER; note = 2'-O-methyluridine-3'-phosphate
  modified_base 14: mod_base = OTHER; note = 2'-O-methyluridine-3'-phosphate
  modified_base 15: mod_base = OTHER; note = 2'-O-methyluridine-3'-phosphate
  modified_base 16: mod_base = OTHER; note = 2'-O-methyluridine-3'-phosphate
  modified_base 17: mod_base = OTHER; note = 2'-O-methyluridine-3'-phosphate
  modified_base 18: mod_base = OTHER; note = 2'-O-methyladenosine-3'-phosphate
  modified_base 19: mod_base = OTHER; note = 2'-O-methyluridine-3'-phosphorothioate
  modified_base 20: mod_base = OTHER; note = 2'-O-methylguanosine-3'-phosphorothioate
  modified_base 21: mod_base = OTHER; note = 2'-O-methyladenosine
gtcatcgagatatttttatga

SEQ ID NO: 348 - RNA, 21 nt, synthetic construct
  source 1..21: mol_type = other RNA
  modified_base 1: mod_base = OTHER; note = 2'-O-methyluridine-3'-phosphorothioate
  modified_base 2: mod_base = OTHER; note = 2'-O-methyluridine-3'-phosphorothioate
  modified_base 3: mod_base = OTHER; note = 2'-O-methyladenosine-3'-phosphate
  modified_base 4: mod_base = OTHER; note = 2'-O-methylcytidine-3'-phosphate
  modified_base 5: mod_base = OTHER; note = 2'-O-methyluridine-3'-phosphate
  modified_base 6: mod_base = OTHER; note = 2'-O-hexadecyl-uridine-3'-phosphate
  modified_base 7: mod_base = OTHER; note = 2'-deoxy-2'-fluorouridine-3'-phosphate
  modified_base 8: mod_base = OTHER; note = 2'-O-methylcytidine-3'-phosphate
  modified_base 9: mod_base = OTHER; note = 2'-deoxy-2'-fluorouridine-3'-phosphate
  modified_base 10: mod_base = OTHER; note = 2'-deoxy-2'-fluorocytidine-3'-phosphate
  modified_base 11: mod_base = OTHER; note = 2'-deoxy-2'-fluorouridine-3'-phosphate
  modified_base 12: mod_base = OTHER; note = 2'-O-methyluridine-3'-phosphate
  modified_base 13: mod_base = OTHER; note = 2'-O-methyluridine-3'-phosphate
  modified_base 14: mod_base = OTHER; note = 2'-O-methyluridine-3'-phosphate
  modified_base 15: mod_base = OTHER; note = 2'-O-methylcytidine-3'-phosphate
  modified_base 16: mod_base = OTHER; note = 2'-O-methyluridine-3'-phosphate
  modified_base 17: mod_base = OTHER; note = 2'-O-methyladenosine-3'-phosphate
  modified_base 18: mod_base = OTHER; note = 2'-O-methyladenosine-3'-phosphate
  modified_base 19: mod_base = OTHER; note = 2'-O-methylguanosine-3'-phosphorothioate
  modified_base 20: mod_base = OTHER; note = 2'-O-methyluridine-3'-phosphorothioate
  modified_base 21: mod_base = OTHER; note = 2'-O-methyladenosine
ttactttctcttttctaagta

SEQ ID NO: 349 - RNA, 21 nt, synthetic construct
  source 1..21: mol_type = other RNA
  modified_base 1: mod_base = OTHER; note = 2'-O-methylcytidine-3'-phosphorothioate
  modified_base 2: mod_base = OTHER; note = 2'-O-methyluridine-3'-phosphorothioate
  modified_base 3: mod_base = OTHER; note = 2'-O-methylguanosine-3'-phosphate
  modified_base 4: mod_base = OTHER; note = 2'-O-methyladenosine-3'-phosphate
  modified_base 5: mod_base = OTHER; note = 2'-O-methyladenosine-3'-phosphate
  modified_base 6: mod_base = OTHER; note = 2'-O-hexadecyl-adenosine-3'-phosphate
  modified_base 7: mod_base = OTHER; note = 2'-deoxy-2'-fluorocytidine-3'-phosphate
  modified_base 8: mod_base = OTHER; note = 2'-O-methyladenosine-3'-phosphate
  modified_base 9: mod_base = OTHER; note = 2'-deoxy-2'-fluorouridine-3'-phosphate
  modified_base 10: mod_base = OTHER; note = 2'-deoxy-2'-fluorocytidine-3'-phosphate
  modified_base 11: mod_base = OTHER; note = 2'-deoxy-2'-fluorouridine-3'-phosphate
  modified_base 12: mod_base = OTHER; note = 2'-O-methylguanosine-3'-phosphate
  modified_base 13: mod_base = OTHER; note = 2'-O-methyluridine-3'-phosphate
  modified_base 14: mod_base = OTHER; note = 2'-O-methylcytidine-3'-phosphate
  modified_base 15: mod_base = OTHER; note = 2'-O-methylcytidine-3'-phosphate
  modified_base 16: mod_base = OTHER; note = 2'-O-methyluridine-3'-phosphate
  modified_base 17: mod_base = OTHER; note = 2'-O-methyladenosine-3'-phosphate
  modified_base 18: mod_base = OTHER; note = 2'-O-methyladenosine-3'-phosphate
  modified_base 19: mod_base = OTHER; note = 2'-O-methylcytidine-3'-phosphorothioate
  modified_base 20: mod_base = OTHER; note = 2'-O-methyluridine-3'-phosphorothioate
  modified_base 21: mod_base = OTHER; note = 2'-O-methyladenosine
ctgaaacatctgtcctaacta

SEQ ID NO: 350 - RNA, 21 nt, synthetic construct
  source 1..21: mol_type = other RNA
  modified_base 1: mod_base = OTHER; note = 2'-O-methylcytidine-3'-phosphorothioate
  modified_base 2: mod_base = OTHER; note = 2'-O-methyladenosine-3'-phosphorothioate
  modified_base 3: mod_base = OTHER; note = 2'-O-methyladenosine-3'-phosphate
  modified_base 4: mod_base = OTHER; note = 2'-O-methylcytidine-3'-phosphate
  modified_base 5: mod_base = OTHER; note = 2'-O-methyluridine-3'-phosphate
  modified_base 6: mod_base = OTHER; note = 2'-O-hexadecyl-cytidine-3'-phosphate
  modified_base 7: mod_base = OTHER; note = 2'-deoxy-2'-fluorouridine-3'-phosphate
  modified_base 8: mod_base = OTHER; note = 2'-O-methylcytidine-3'-phosphate
  modified_base 9: mod_base = OTHER; note = 2'-deoxy-2'-fluorouridine-3'-phosphate
  modified_base 10: mod_base = OTHER; note = 2'-deoxy-2'-fluorouridine-3'-phosphate
  modified_base 11: mod_base = OTHER; note = 2'-deoxy-2'-fluorouridine-3'-phosphate
  modified_base 12: mod_base = OTHER; note = 2'-O-methylcytidine-3'-phosphate
  modified_base 13: mod_base = OTHER; note = 2'-O-methylcytidine-3'-phosphate
  modified_base 14: mod_base = OTHER; note = 2'-O-methyluridine-3'-phosphate
  modified_base 15: mod_base = OTHER; note = 2'-O-methyladenosine-3'-phosphate
  modified_base 16: mod_base = OTHER; note = 2'-O-methyladenosine-3'-phosphate
  modified_base 17: mod_base = OTHER; note = 2'-O-methyladenosine-3'-phosphate
  modified_base 18: mod_base = OTHER; note = 2'-O-methylguanosine-3'-phosphate
  modified_base 19: mod_base = OTHER; note = 2'-O-methyladenosine-3'-phosphorothioate
  modified_base 20: mod_base = OTHER; note = 2'-O-methyladenosine-3'-phosphorothioate
  modified_base 21: mod_base = OTHER; note = 2'-O-methyladenosine
caactctctttcctaaagaaa

SEQ ID NO: 351 - RNA, 21 nt, synthetic construct
  source 1..21: mol_type = other RNA
  modified_base 1: mod_base = OTHER; note = 2'-O-methyluridine-3'-phosphorothioate
  modified_base 2: mod_base = OTHER; note = 2'-O-methylguanosine-3'-phosphorothioate
  modified_base 3: mod_base = OTHER; note = 2'-O-methyladenosine-3'-phosphate
  modified_base 4: mod_base = OTHER; note = 2'-O-methyladenosine-3'-phosphate
  modified_base 5: mod_base = OTHER; note = 2'-O-methylguanosine-3'-phosphate
  modified_base 6: mod_base = OTHER; note = 2'-O-hexadecyl-adenosine-3'-phosphate
  modified_base 7: mod_base = OTHER; note = 2'-deoxy-2'-fluoroadenosine-3'-phosphate
  modified_base 8: mod_base = OTHER; note = 2'-O-methylguanosine-3'-phosphate
  modified_base 9: mod_base = OTHER; note = 2'-deoxy-2'-fluorouridine-3'-phosphate
  modified_base 10: mod_base = OTHER; note = 2'-deoxy-2'-fluorocytidine-3'-phosphate
  modified_base 11: mod_base = OTHER; note = 2'-deoxy-2'-fluorouridine-3'-phosphate
  modified_base 12: mod_base = OTHER; note = 2'-O-methylcytidine-3'-phosphate
  modified_base 13: mod_base = OTHER; note = 2'-O-methyluridine-3'-phosphate
  modified_base 14: mod_base = OTHER; note = 2'-O-methylcytidine-3'-phosphate
  modified_base 15: mod_base = OTHER; note = 2'-O-methyluridine-3'-phosphate
  modified_base 16: mod_base = OTHER; note = 2'-O-methyluridine-3'-phosphate
  modified_base 17: mod_base = OTHER; note = 2'-O-methylcytidine-3'-phosphate
  modified_base 18: mod_base = OTHER; note = 2'-O-methyluridine-3'-phosphate
  modified_base 19: mod_base = OTHER; note = 2'-O-methylcytidine-3'-phosphorothioate
  modified_base 20: mod_base = OTHER; note = 2'-O-methyluridine-3'-phosphorothioate
  modified_base 21: mod_base = OTHER; note = 2'-O-methyladenosine
tgaagaagtctctcttctcta

SEQ ID NO: 352 - RNA, 21 nt, synthetic construct
  source 1..21: mol_type = other RNA
  modified_base 1: mod_base = OTHER; note = 2'-O-methyluridine-3'-phosphorothioate
  modified_base 2: mod_base = OTHER; note = 2'-O-methyluridine-3'-phosphorothioate
  modified_base 3: mod_base = OTHER; note = 2'-O-methyluridine-3'-phosphate
  modified_base 4: mod_base = OTHER; note = 2'-O-methylcytidine-3'-phosphate
  modified_base 5: mod_base = OTHER; note = 2'-O-methyluridine-3'-phosphate
  modified_base 6: mod_base = OTHER; note = 2'-O-hexadecyl-uridine-3'-phosphate
  modified_base 7: mod_base = OTHER; note = 2'-deoxy-2'-fluoroadenosine-3'-phosphate
  modified_base 8: mod_base = OTHER; note = 2'-O-methyladenosine-3'-phosphate
  modified_base 9: mod_base = OTHER; note = 2'-deoxy-2'-fluoroadenosine-3'-phosphate
  modified_base 10: mod_base = OTHER; note = 2'-deoxy-2'-fluorouridine-3'-phosphate
  modified_base 11: mod_base = OTHER; note = 2'-deoxy-2'-fluorouridine-3'-phosphate
  modified_base 12: mod_base = OTHER; note = 2'-O-methyluridine-3'-phosphate
  modified_base 13: mod_base = OTHER; note = 2'-O-methylcytidine-3'-phosphate
  modified_base 14: mod_base = OTHER; note = 2'-O-methyluridine-3'-phosphate
  modified_base 15: mod_base = OTHER; note = 2'-O-methyladenosine-3'-phosphate
  modified_base 16: mod_base = OTHER; note = 2'-O-methylguanosine-3'-phosphate
  modified_base 17: mod_base = OTHER; note = 2'-O-methylguanosine-3'-phosphate
  modified_base 18: mod_base = OTHER; note = 2'-O-methylguanosine-3'-phosphate
  modified_base 19: mod_base = OTHER; note = 2'-O-methylcytidine-3'-phosphorothioate
  modified_base 20: mod_base = OTHER; note = 2'-O-methyluridine-3'-phosphorothioate
  modified_base 21: mod_base = OTHER; note = 2'-O-methyladenosine
tttcttaaatttctagggcta

SEQ ID NO: 353 - RNA, 21 nt, synthetic construct
  source 1..21: mol_type = other RNA
  modified_base 1: mod_base = OTHER; note = 2'-O-methylcytidine-3'-phosphorothioate
  modified_base 2: mod_base = OTHER; note = 2'-O-methyluridine-3'-phosphorothioate
  modified_base 3: mod_base = OTHER; note = 2'-O-methylguanosine-3'-phosphate
  modified_base 4: mod_base = OTHER; note = 2'-O-methyladenosine-3'-phosphate
  modified_base 5: mod_base = OTHER; note = 2'-O-methylcytidine-3'-phosphate
  modified_base 6: mod_base = OTHER; note = 2'-O-hexadecyl-cytidine-3'-phosphate
  modified_base 7: mod_base = OTHER; note = 2'-deoxy-2'-fluoroadenosine-3'-phosphate
  modified_base 8: mod_base = OTHER; note = 2'-O-methyluridine-3'-phosphate
  modified_base 9: mod_base = OTHER; note = 2'-deoxy-2'-fluoroguanosine-3'-phosphate
  modified_base 10: mod_base = OTHER; note = 2'-deoxy-2'-fluorouridine-3'-phosphate
  modified_base 11: mod_base = OTHER; note = 2'-deoxy-2'-fluoroguanosine-3'-phosphate
  modified_base 12: mod_base = OTHER; note = 2'-O-methylguanosine-3'-phosphate
  modified_base 13: mod_base = OTHER; note = 2'-O-methyluridine-3'-phosphate
  modified_base 14: mod_base = OTHER; note = 2'-O-methyluridine-3'-phosphate
  modified_base 15: mod_base = OTHER; note = 2'-O-methyluridine-3'-phosphate
  modified_base 16: mod_base = OTHER; note = 2'-O-methylcytidine-3'-phosphate
  modified_base 17: mod_base = OTHER; note = 2'-O-methylcytidine-3'-phosphate
  modified_base 18: mod_base = OTHER; note = 2'-O-methyladenosine-3'-phosphate
  modified_base 19: mod_base = OTHER; note = 2'-O-methylcytidine-3'-phosphorothioate
  modified_base 20: mod_base = OTHER; note = 2'-O-methyladenosine-3'-phosphorothioate
  modified_base 21: mod_base = OTHER; note = 2'-O-methyladenosine
ctgaccatgtggtttccacaa

SEQ ID NO: 354 - RNA, 21 nt, synthetic construct
  source 1..21: mol_type = other RNA
  modified_base 1: mod_base = OTHER; note = 2'-O-methylcytidine-3'-phosphorothioate
  modified_base 2: mod_base = OTHER; note = 2'-O-methyluridine-3'-phosphorothioate
  modified_base 3: mod_base = OTHER; note = 2'-O-methylcytidine-3'-phosphate
  modified_base 4: mod_base = OTHER; note = 2'-O-methylcytidine-3'-phosphate
  modified_base 5: mod_base = OTHER; note = 2'-O-methylcytidine-3'-phosphate
  modified_base 6: mod_base = OTHER; note = 2'-O-hexadecyl-adenosine-3'-phosphate
  modified_base 7: mod_base = OTHER; note = 2'-deoxy-2'-fluorouridine-3'-phosphate
  modified_base 8: mod_base = OTHER; note = 2'-O-methylguanosine-3'-phosphate
  modified_base 9: mod_base = OTHER; note = 2'-deoxy-2'-fluoroguanosine-3'-phosphate
  modified_base 10: mod_base = OTHER; note = 2'-deoxy-2'-fluoroguanosine-3'-phosphate
  modified_base 11: mod_base = OTHER; note = 2'-deoxy-2'-fluoroadenosine-3'-phosphate
  modified_base 12: mod_base = OTHER; note = 2'-O-methyladenosine-3'-phosphate
  modified_base 13: mod_base = OTHER; note = 2'-O-methylguanosine-3'-phosphate
  modified_base 14: mod_base = OTHER; note = 2'-O-methyladenosine-3'-phosphate
  modified_base 15: mod_base = OTHER; note = 2'-O-methyluridine-3'-phosphate
  modified_base 16: mod_base = OTHER; note = 2'-O-methylcytidine-3'-phosphate
  modified_base 17: mod_base = OTHER; note = 2'-O-methyluridine-3'-phosphate
  modified_base 18: mod_base = OTHER; note = 2'-O-methylguanosine-3'-phosphate
  modified_base 19: mod_base = OTHER; note = 2'-O-methylcytidine-3'-phosphorothioate
  modified_base 20: mod_base = OTHER; note = 2'-O-methyladenosine-3'-phosphorothioate
  modified_base 21: mod_base = OTHER; note = 2'-O-methyladenosine
ctcccatgggaagatctgcaa

SEQ ID NO: 355 - RNA, 21 nt, synthetic construct
  source 1..21: mol_type = other RNA
  modified_base 1: mod_base = OTHER; note = 2'-O-methyladenosine-3'-phosphorothioate
  modified_base 2: mod_base = OTHER; note = 2'-O-methyladenosine-3'-phosphorothioate
  modified_base 3: mod_base = OTHER; note = 2'-O-methyladenosine-3'-phosphate
  modified_base 4: mod_base = OTHER; note = 2'-O-methyluridine-3'-phosphate
  modified_base 5: mod_base = OTHER; note = 2'-O-methylcytidine-3'-phosphate
  modified_base 6: mod_base = OTHER; note = 2'-O-hexadecyl-adenosine-3'-phosphate
  modified_base 7: mod_base = OTHER; note = 2'-deoxy-2'-fluoroguanosine-3'-phosphate
  modified_base 8: mod_base = OTHER; note = 2'-O-methyluridine-3'-phosphate
  modified_base 9: mod_base = OTHER; note = 2'-deoxy-2'-fluoroguanosine-3'-phosphate
  modified_base 10: mod_base = OTHER; note = 2'-deoxy-2'-fluoroadenosine-3'-phosphate
  modified_base 11: mod_base = OTHER; note = 2'-deoxy-2'-fluoroguanosine-3'-phosphate
  modified_base 12: mod_base = OTHER; note = 2'-O-methylcytidine-3'-phosphate
  modified_base 13: mod_base = OTHER; note = 2'-O-methyladenosine-3'-phosphate
  modified_base 14: mod_base = OTHER; note = 2'-O-methylcytidine-3'-phosphate
  modified_base 15: mod_base = OTHER; note = 2'-O-methylcytidine-3'-phosphate
  modified_base 16: mod_base = OTHER; note = 2'-O-methyluridine-3'-phosphate
  modified_base 17: mod_base = OTHER; note = 2'-O-methyluridine-3'-phosphate
  modified_base 18: mod_base = OTHER; note = 2'-O-methyluridine-3'-phosphate
  modified_base 19: mod_base = OTHER; note = 2'-O-methylguanosine-3'-phosphorothioate
  modified_base 20: mod_base = OTHER; note = 2'-O-methyladenosine-3'-phosphorothioate
  modified_base 21: mod_base = OTHER; note = 2'-O-methyladenosine
aaatcagtgagcacctttgaa

SEQ ID NO: 356 - RNA, 21 nt, synthetic construct
  source 1..21: mol_type = other RNA
  modified_base 1: mod_base = OTHER; note = 2'-O-methylcytidine-3'-phosphorothioate
  modified_base 2: mod_base = OTHER; note = 2'-O-methylcytidine-3'-phosphorothioate
  modified_base 3: mod_base = OTHER; note = 2'-O-methyladenosine-3'-phosphate
  modified_base 4: mod_base = OTHER; note = 2'-O-methylcytidine-3'-phosphate
  modified_base 5: mod_base = OTHER; note = 2'-O-methylguanosine-3'-phosphate
  modified_base 6: mod_base = OTHER; note = 2'-O-hexadecyl-adenosine-3'-phosphate
  modified_base 7: mod_base = OTHER; note = 2'-deoxy-2'-fluoroadenosine-3'-phosphate
  modified_base 8: mod_base = OTHER; note = 2'-O-methylguanosine-3'-phosphate
  modified_base 9: mod_base = OTHER; note = 2'-deoxy-2'-fluoroadenosine-3'-phosphate
  modified_base 10: mod_base = OTHER; note = 2'-deoxy-2'-fluoroadenosine-3'-phosphate
  modified_base 11: mod_base = OTHER; note = 2'-deoxy-2'-fluorocytidine-3'-phosphate
  modified_base 12: mod_base = OTHER; note = 2'-O-methyluridine-3'-phosphate
  modified_base 13: mod_base = OTHER; note = 2'-O-methyluridine-3'-phosphate
  modified_base 14: mod_base = OTHER; note = 2'-O-methyluridine-3'-phosphate
  modified_base 15: mod_base = OTHER; note = 2'-O-methylcytidine-3'-phosphate
  modified_base 16: mod_base = OTHER; note = 2'-O-methyluridine-3'-phosphate
  modified_base 17: mod_base = OTHER; note = 2'-O-methylcytidine-3'-phosphate
  modified_base 18: mod_base = OTHER; note = 2'-O-methyladenosine-3'-phosphate
  modified_base 19: mod_base = OTHER; note = 2'-O-methyladenosine-3'-phosphorothioate
  modified_base 20: mod_base = OTHER; note = 2'-O-methylcytidine-3'-phosphorothioate
  modified_base 21: mod_base = OTHER; note = 2'-O-methyladenosine
ccacgaagaactttctcaaca

SEQ ID NO: 357 - RNA, 21 nt, synthetic construct
  source 1..21: mol_type = other RNA
  modified_base 1: mod_base = OTHER; note = 2'-O-methylguanosine-3'-phosphorothioate
  modified_base 2: mod_base = OTHER; note = 2'-O-methylcytidine-3'-phosphorothioate
  modified_base 3: mod_base = OTHER; note = 2'-O-methyladenosine-3'-phosphate
  modified_base 4: mod_base = OTHER; note = 2'-O-methyladenosine-3'-phosphate
  modified_base 5: mod_base = OTHER; note = 2'-O-methyluridine-3'-phosphate
  modified_base 6: mod_base = OTHER; note = 2'-O-hexadecyl-guanosine-3'-phosphate
  modified_base 7: mod_base = OTHER; note = 2'-deoxy-2'-fluorocytidine-3'-phosphate
  modified_base 8: mod_base = OTHER; note = 2'-O-methyladenosine-3'-phosphate
  modified_base 9: mod_base = OTHER; note = 2'-deoxy-2'-fluoroguanosine-3'-phosphate
  modified_base 10: mod_base = OTHER; note = 2'-deoxy-2'-fluorouridine-3'-phosphate
  modified_base 11: mod_base = OTHER; note = 2'-deoxy-2'-fluorouridine-3'-phosphate
  modified_base 12: mod_base = OTHER; note = 2'-O-methyladenosine-3'-phosphate
  modified_base 13: mod_base = OTHER; note = 2'-O-methyladenosine-3'-phosphate
  modified_base 14: mod_base = OTHER; note = 2'-O-methyladenosine-3'-phosphate
  modified_base 15: mod_base = OTHER; note = 2'-O-methyladenosine-3'-phosphate
  modified_base 16: mod_base = OTHER; note = 2'-O-methylguanosine-3'-phosphate
  modified_base 17: mod_base = OTHER; note = 2'-O-methylguanosine-3'-phosphate
  modified_base 18: mod_base = OTHER; note = 2'-O-methylguanosine-3'-phosphate
  modified_base 19: mod_base = OTHER; note = 2'-O-methyluridine-3'-phosphorothioate
  modified_base 20: mod_base = OTHER; note = 2'-O-methylguanosine-3'-phosphorothioate
  modified_base 21: mod_base = OTHER; note = 2'-O-methyladenosine
gcaatgcagttaaaagggtga

SEQ ID NO: 358 - RNA, 21 nt, synthetic construct
  source 1..21: mol_type = other RNA
  modified_base 1: mod_base = OTHER; note = 2'-O-methylguanosine-3'-phosphorothioate
  modified_base 2: mod_base = OTHER; note = 2'-O-methylcytidine-3'-phosphorothioate
  modified_base 3: mod_base = OTHER; note = 2'-O-methylcytidine-3'-phosphate
  modified_base 4: mod_base = OTHER; note = 2'-O-methyluridine-3'-phosphate
  modified_base 5: mod_base = OTHER; note = 2'-O-methylcytidine-3'-phosphate
  modified_base 6: mod_base = OTHER; note = 2'-O-hexadecyl-adenosine-3'-phosphate
  modified_base 7: mod_base = OTHER; note = 2'-deoxy-2'-fluoroadenosine-3'-phosphate
  modified_base 8: mod_base = OTHER; note = 2'-O-methyladenosine-3'-phosphate
  modified_base 9: mod_base = OTHER; note = 2'-deoxy-2'-fluorouridine-3'-phosphate
  modified_base 10: mod_base = OTHER; note = 2'-deoxy-2'-fluorocytidine-3'-phosphate
  modified_base 11: mod_base = OTHER; note = 2'-deoxy-2'-fluorouridine-3'-phosphate
  modified_base 12: mod_base = OTHER; note = 2'-O-methyladenosine-3'-phosphate
  modified_base 13: mod_base = OTHER; note = 2'-O-methylguanosine-3'-phosphate
  modified_base 14: mod_base = OTHER; note = 2'-O-methyluridine-3'-phosphate
  modified_base 15: mod_base = OTHER; note = 2'-O-methylcytidine-3'-phosphate
  modified_base 16: mod_base = OTHER; note = 2'-O-methyladenosine-3'-phosphate
  modified_base 17: mod_base = OTHER; note = 2'-O-methyluridine-3'-phosphate
  modified_base 18: mod_base = OTHER; note = 2'-O-methyluridine-3'-phosphate
  modified_base 19: mod_base = OTHER; note = 2'-O-methyladenosine-3'-phosphorothioate
  modified_base 20: mod_base = OTHER; note = 2'-O-methylcytidine-3'-phosphorothioate
  modified_base 21: mod_base = OTHER; note = 2'-O-methyladenosine
gcctcaaatctagtcattaca

SEQ ID NO: 359 - RNA, 21 nt, synthetic construct
  source 1..21: mol_type = other RNA
  modified_base 1: mod_base = OTHER; note = 2'-O-methyluridine-3'-phosphorothioate
  modified_base 2: mod_base = OTHER; note = 2'-O-methyluridine-3'-phosphorothioate
  modified_base 3: mod_base = OTHER; note = 2'-O-methyladenosine-3'-phosphate
  modified_base 4: mod_base = OTHER; note = 2'-O-methylcytidine-3'-phosphate
  modified_base 5: mod_base = OTHER; note = 2'-O-methyladenosine-3'-phosphate
  modified_base 6: mod_base = OTHER; note = 2'-O-hexadecyl-cytidine-3'-phosphate
  modified_base 7: mod_base = OTHER; note = 2'-deoxy-2'-fluorocytidine-3'-phosphate
  modified_base 8: mod_base = OTHER; note = 2'-O-methyladenosine-3'-phosphate
  modified_base 9: mod_base = OTHER; note = 2'-deoxy-2'-fluoroguanosine-3'-phosphate
  modified_base 10: mod_base = OTHER; note = 2'-deoxy-2'-fluorouridine-3'-phosphate
  modified_base 11: mod_base = OTHER; note = 2'-deoxy-2'-fluorocytidine-3'-phosphate
  modified_base 12: mod_base = OTHER; note = 2'-O-methyladenosine-3'-phosphate
  modified_base 13: mod_base = OTHER; note = 2'-O-methyladenosine-3'-phosphate
  modified_base 14: mod_base = OTHER; note = 2'-O-methylcytidine-3'-phosphate
  modified_base 15: mod_base = OTHER; note = 2'-O-methyladenosine-3'-phosphate
  modified_base 16: mod_base = OTHER; note = 2'-O-methylguanosine-3'-phosphate
  modified_base 17: mod_base = OTHER; note = 2'-O-methyladenosine-3'-phosphate
  modified_base 18: mod_base = OTHER; note = 2'-O-methyladenosine-3'-phosphate
  modified_base 19: mod_base = OTHER; note = 2'-O-methylguanosine-3'-phosphorothioate
  modified_base 20: mod_base = OTHER; note = 2'-O-methyluridine-3'-phosphorothioate
  modified_base 21: mod_base = OTHER; note = 2'-O-methyladenosine
ttacaccagtcaacagaagta

SEQ ID NO: 360 - RNA, 21 nt, synthetic construct
  source 1..21: mol_type = other RNA
  modified_base 1: mod_base = OTHER; note = 2'-O-methylcytidine-3'-phosphorothioate
  modified_base 2: mod_base = OTHER; note = 2'-O-methyluridine-3'-phosphorothioate
  modified_base 3: mod_base = OTHER; note = 2'-O-methylcytidine-3'-phosphate
  modified_base 4: mod_base = OTHER; note = 2'-O-methylcytidine-3'-phosphate
  modified_base 5: mod_base = OTHER; note = 2'-O-methyluridine-3'-phosphate
  modified_base 6: mod_base = OTHER; note = 2'-O-hexadecyl-cytidine-3'-phosphate
  modified_base 7: mod_base = OTHER; note = 2'-deoxy-2'-fluoroadenosine-3'-phosphate
  modified_base 8: mod_base = OTHER; note = 2'-O-methylguanosine-3'-phosphate
  modified_base 9: mod_base = OTHER; note = 2'-deoxy-2'-fluorocytidine-3'-phosphate
  modified_base 10: mod_base = OTHER; note = 2'-deoxy-2'-fluorouridine-3'-phosphate
  modified_base 11: mod_base = OTHER; note = 2'-deoxy-2'-fluorocytidine-3'-phosphate
  modified_base 12: mod_base = OTHER; note = 2'-O-methylcytidine-3'-phosphate
  modified_base 13: mod_base = OTHER; note = 2'-O-methyluridine-3'-phosphate
  modified_base 14: mod_base = OTHER; note = 2'-O-methyluridine-3'-phosphate
  modified_base 15: mod_base = OTHER; note = 2'-O-methyladenosine-3'-phosphate
  modified_base 16: mod_base = OTHER; note = 2'-O-methyladenosine-3'-phosphate
  modified_base 17: mod_base = OTHER; note = 2'-O-methylcytidine-3'-phosphate
  modified_base 18: mod_base = OTHER; note = 2'-O-methylcytidine-3'-phosphate
  modified_base 19: mod_base = OTHER; note = 2'-O-methylcytidine-3'-phosphorothioate
  modified_base 20: mod_base = OTHER; note = 2'-O-methyluridine-3'-phosphorothioate
  modified_base 21: mod_base = OTHER; note = 2'-O-methyladenosine
ctcctcagctccttaacccta

SEQ ID NO: 361 - RNA, 21 nt, synthetic construct
  source 1..21: mol_type = other RNA
  modified_base 1: mod_base = OTHER; note = 2'-O-methyluridine-3'-phosphorothioate
  modified_base 2: mod_base = OTHER; note = 2'-O-methylguanosine-3'-phosphorothioate
  modified_base 3: mod_base = OTHER; note = 2'-O-methylguanosine-3'-phosphate
  modified_base 4: mod_base = OTHER; note = 2'-O-methyladenosine-3'-phosphate
  modified_base 5: mod_base = OTHER; note = 2'-O-methyluridine-3'-phosphate
  modified_base 6: mod_base = OTHER; note = 2'-O-hexadecyl-uridine-3'-phosphate
  modified_base 7: mod_base = OTHER; note = 2'-deoxy-2'-fluoroguanosine-3'-phosphate
  modified_base 8: mod_base = OTHER; note = 2'-O-methyluridine-3'-phosphate
  modified_base 9: mod_base = OTHER; note = 2'-deoxy-2'-fluoroadenosine-3'-phosphate
  modified_base 10: mod_base = OTHER; note = 2'-deoxy-2'-fluoroadenosine-3'-phosphate
  modified_base 11: mod_base = OTHER; note = 2'-deoxy-2'-fluorocytidine-3'-phosphate
  modified_base 12: mod_base = OTHER; note = 2'-O-methylcytidine-3'-phosphate
  modified_base 13: mod_base = OTHER; note = 2'-O-methyluridine-3'-phosphate
  modified_base 14: mod_base = OTHER; note = 2'-O-methylcytidine-3'-phosphate
  modified_base 15: mod_base = OTHER; note = 2'-O-methyluridine-3'-phosphate
  modified_base 16: mod_base = OTHER; note = 2'-O-methylcytidine-3'-phosphate
  modified_base 17: mod_base = OTHER; note = 2'-O-methylcytidine-3'-phosphate
  modified_base 18: mod_base = OTHER; note = 2'-O-methylcytidine-3'-phosphate
  modified_base 19: mod_base = OTHER; note = 2'-O-methyluridine-3'-phosphorothioate
  modified_base 20: mod_base = OTHER; note = 2'-O-methyluridine-3'-phosphorothioate
  modified_base 21: mod_base = OTHER; note = 2'-O-methyladenosine
tggattgtaacctctccctta

SEQ ID NO: 362 - RNA, 21 nt, synthetic construct
  source 1..21: mol_type = other RNA
  modified_base 1: mod_base = OTHER; note = 2'-O-methylcytidine-3'-phosphorothioate
  modified_base 2: mod_base = OTHER; note = 2'-O-methyluridine-3'-phosphorothioate
  modified_base 3: mod_base = OTHER; note = 2'-O-methyluridine-3'-phosphate
  modified_base 4: mod_base = OTHER; note = 2'-O-methylguanosine-3'-phosphate
  modified_base 5: mod_base = OTHER; note = 2'-O-methyluridine-3'-phosphate
  modified_base 6: mod_base = OTHER; note = 2'-O-hexadecyl-cytidine-3'-phosphate
  modified_base 7: mod_base = OTHER; note = 2'-deoxy-2'-fluorocytidine-3'-phosphate
  modified_base 8: mod_base = OTHER; note = 2'-O-methyladenosine-3'-phosphate
  modified_base 9: mod_base = OTHER; note = 2'-deoxy-2'-fluoroadenosine-3'-phosphate
  modified_base 10: mod_base = OTHER; note = 2'-deoxy-2'-fluoroadenosine-3'-phosphate
  modified_base 11: mod_base = OTHER; note = 2'-deoxy-2'-fluorouridine-3'-phosphate
  modified_base 12: mod_base = OTHER; note = 2'-O-methylcytidine-3'-phosphate
  modified_base 13: mod_base = OTHER; note = 2'-O-methyluridine-3'-phosphate
  modified_base 14: mod_base = OTHER; note = 2'-O-methyladenosine-3'-phosphate
  modified_base 15: mod_base = OTHER; note = 2'-O-methylguanosine-3'-phosphate
  modified_base 16: mod_base = OTHER; note = 2'-O-methylguanosine-3'-phosphate
  modified_base 17: mod_base = OTHER; note = 2'-O-methyladenosine-3'-phosphate
  modified_base 18: mod_base = OTHER; note = 2'-O-methyluridine-3'-phosphate
  modified_base 19: mod_base = OTHER; note = 2'-O-methyluridine-3'-phosphorothioate
  modified_base 20: mod_base = OTHER; note = 2'-O-methylcytidine-3'-phosphorothioate
  modified_base 21: mod_base = OTHER; note = 2'-O-methyladenosine
cttgtccaaatctaggattca

SEQ ID NO: 363 - RNA, 21 nt, synthetic construct
  source 1..21: mol_type = other RNA
  modified_base 1: mod_base = OTHER; note = 2'-O-methyluridine-3'-phosphorothioate
  modified_base 2: mod_base = OTHER; note = 2'-O-methylcytidine-3'-phosphorothioate
  modified_base 3: mod_base = OTHER; note = 2'-O-methylcytidine-3'-phosphate
  modified_base 4: mod_base = OTHER; note = 2'-O-methyluridine-3'-phosphate
  modified_base 5: mod_base = OTHER; note = 2'-O-methylguanosine-3'-phosphate
  modified_base 6: mod_base = OTHER; note = 2'-O-hexadecyl-guanosine-3'-phosphate
  modified_base 7: mod_base = OTHER; note = 2'-deoxy-2'-fluorouridine-3'-phosphate
  modified_base 8: mod_base = OTHER; note = 2'-O-methyladenosine-3'-phosphate
  modified_base 9: mod_base = OTHER; note = 2'-deoxy-2'-fluoroguanosine-3'-phosphate
  modified_base 10: mod_base = OTHER; note = 2'-deoxy-2'-fluoroguanosine-3'-phosphate
  modified_base 11: mod_base = OTHER; note = 2'-deoxy-2'-fluoroadenosine-3'-phosphate
  modified_base 12: mod_base = OTHER; note = 2'-O-methyladenosine-3'-phosphate
  modified_base 13: mod_base = OTHER; note = 2'-O-methyladenosine-3'-phosphate
  modified_base 14: mod_base = OTHER; note = 2'-O-methyladenosine-3'-phosphate
  modified_base 15: mod_base = OTHER; note = 2'-O-methylguanosine-3'-phosphate
  modified_base 16: mod_base = OTHER; note = 2'-O-methylguanosine-3'-phosphate
  modified_base 17: mod_base = OTHER; note = 2'-O-methyladenosine-3'-phosphate
  modified_base 18: mod_base = OTHER; note = 2'-O-methyladenosine-3'-phosphate
  modified_base 19: mod_base = OTHER; note = 2'-O-methyladenosine-3'-phosphorothioate
  modified_base 20: mod_base = OTHER; note = 2'-O-methyladenosine-3'-phosphorothioate
  modified_base 21: mod_base = OTHER; note = 2'-O-methyladenosine
tcctggtaggaaaaggaaaaa

SEQ ID NO: 364 - RNA, 21 nt, synthetic construct
  source 1..21: mol_type = other RNA
  modified_base 1: mod_base = OTHER; note = 2'-O-methyluridine-3'-phosphorothioate
  modified_base 2: mod_base = OTHER; note = 2'-O-methylcytidine-3'-phosphorothioate
  modified_base 3: mod_base = OTHER; note = 2'-O-methylcytidine-3'-phosphate
  modified_base 4: mod_base = OTHER; note = 2'-O-methylcytidine-3'-phosphate
  modified_base 5: mod_base = OTHER; note = 2'-O-methyluridine-3'-phosphate
  modified_base 6: mod_base = OTHER; note = 2'-O-hexadecyl-cytidine-3'-phosphate
  modified_base 7: mod_base = OTHER; note = 2'-deoxy-2'-fluorocytidine-3'-phosphate
  modified_base 8: mod_base = OTHER; note = 2'-O-methyladenosine-3'-phosphate
  modified_base 9: mod_base = OTHER; note = 2'-deoxy-2'-fluorocytidine-3'-phosphate
  modified_base 10: mod_base = OTHER; note = 2'-deoxy-2'-fluorocytidine-3'-phosphate
  modified_base 11: mod_base = OTHER; note = 2'-deoxy-2'-fluoroadenosine-3'-phosphate
  modified_base 12: mod_base = OTHER; note = 2'-O-methylcytidine-3'-phosphate
  modified_base 13: mod_base = OTHER; note = 2'-O-methyluridine-3'-phosphate
  modified_base 14: mod_base = OTHER; note = 2'-O-methyluridine-3'-phosphate
  modified_base 15: mod_base = OTHER; note = 2'-O-methylcytidine-3'-phosphate
  modified_base 16: mod_base = OTHER; note = 2'-O-methylcytidine-3'-phosphate
  modified_base 17: mod_base = OTHER; note = 2'-O-methyladenosine-3'-phosphate
  modified_base 18: mod_base = OTHER; note = 2'-O-methyladenosine-3'-phosphate
  modified_base 19: mod_base = OTHER; note = 2'-O-methylcytidine-3'-phosphorothioate
  modified_base 20: mod_base = OTHER; note = 2'-O-methyluridine-3'-phosphorothioate
  modified_base 21: mod_base = OTHER; note = 2'-O-methyladenosine
tccctccaccacttccaacta

SEQ ID NO: 365 - RNA, 21 nt, synthetic construct
  source 1..21: mol_type = other RNA
  modified_base 1: mod_base = OTHER; note = 2'-O-methylcytidine-3'-phosphorothioate
  modified_base 2: mod_base = OTHER; note = 2'-O-methyluridine-3'-phosphorothioate
  modified_base 3: mod_base = OTHER; note = 2'-O-methylguanosine-3'-phosphate
  modified_base 4: mod_base = OTHER; note = 2'-O-methylguanosine-3'-phosphate
  modified_base 5: mod_base = OTHER; note = 2'-O-methyladenosine-3'-phosphate
  modified_base 6: mod_base = OTHER; note = 2'-O-hexadecyl-cytidine-3'-phosphate
  modified_base 7: mod_base = OTHER; note = 2'-deoxy-2'-fluorouridine-3'-phosphate
  modified_base 8: mod_base = OTHER; note = 2'-O-methyluridine-3'-phosphate
  modified_base 9: mod_base = OTHER; note = 2'-deoxy-2'-fluoroguanosine-3'-phosphate
  modified_base 10: mod_base = OTHER; note = 2'-deoxy-2'-fluoroguanosine-3'-phosphate
  modified_base 11: mod_base = OTHER; note = 2'-deoxy-2'-fluoroadenosine-3'-phosphate
  modified_base 12: mod_base = OTHER; note = 2'-O-methylguanosine-3'-phosphate
  modified_base 13: mod_base = OTHER; note = 2'-O-methyladenosine-3'-phosphate
  modified_base 14: mod_base = OTHER; note = 2'-O-methyladenosine-3'-phosphate
  modified_base 15: mod_base = OTHER; note = 2'-O-methylcytidine-3'-phosphate
  modified_base 16: mod_base = OTHER; note = 2'-O-methylcytidine-3'-phosphate
  modified_base 17: mod_base = OTHER; note = 2'-O-methyladenosine-3'-phosphate
  modified_base 18: mod_base = OTHER; note = 2'-O-methylguanosine-3'-phosphate
  modified_base 19: mod_base = OTHER; note = 2'-O-methyladenosine-3'-phosphorothioate
  modified_base 20: mod_base = OTHER; note = 2'-O-methylguanosine-3'-phosphorothioate
  modified_base 21: mod_base = OTHER; note = 2'-O-methyladenosine
ctggacttggagaaccagaga

SEQ ID NO: 366 - RNA, 21 nt, synthetic construct
  source 1..21: mol_type = other RNA
  modified_base 1: mod_base = OTHER; note = 2'-O-methylcytidine-3'-phosphorothioate
  modified_base 2: mod_base = OTHER; note = 2'-O-methyladenosine-3'-phosphorothioate
  modified_base 3: mod_base = OTHER; note = 2'-O-methylcytidine-3'-phosphate
  modified_base 4: mod_base = OTHER; note = 2'-O-methylcytidine-3'-phosphate
  modified_base 5: mod_base = OTHER; note = 2'-O-methyluridine-3'-phosphate
  modified_base 6: mod_base = OTHER; note = 2'-O-hexadecyl-guanosine-3'-phosphate
  modified_base 7: mod_base = OTHER; note = 2'-deoxy-2'-fluorouridine-3'-phosphate
  modified_base 8: mod_base = OTHER; note = 2'-O-methyluridine-3'-phosphate
  modified_base 9: mod_base = OTHER; note = 2'-deoxy-2'-fluoroadenosine-3'-phosphate
  modified_base 10: mod_base = OTHER; note = 2'-deoxy-2'-fluoroguanosine-3'-phosphate
  modified_base 11: mod_base = OTHER; note = 2'-deoxy-2'-fluoroadenosine-3'-phosphate
  modified_base 12: mod_base = OTHER; note = 2'-O-methyladenosine-3'-phosphate
  modified_base 13: mod_base = OTHER; note = 2'-O-methyluridine-3'-phosphate
  modified_base 14: mod_base = OTHER; note = 2'-O-methylcytidine-3'-phosphate
  modified_base 15: mod_base = OTHER; note = 2'-O-methyladenosine-3'-phosphate
  modified_base 16: mod_base = OTHER; note = 2'-O-methylguanosine-3'-phosphate
  modified_base 17: mod_base = OTHER; note = 2'-O-methyladenosine-3'-phosphate
  modified_base 18: mod_base = OTHER; note = 2'-O-methylguanosine-3'-phosphate
  modified_base 19: mod_base = OTHER; note = 2'-O-methylcytidine-3'-phosphorothioate
  modified_base 20: mod_base = OTHER; note = 2'-O-methyluridine-3'-phosphorothioate
  modified_base 21: mod_base = OTHER; note = 2'-O-methyladenosine
cacctgttagaatcagagcta

SEQ ID NO: 367 - RNA, 21 nt, synthetic construct
  source 1..21: mol_type = other RNA
  modified_base 1: mod_base = OTHER; note = 2'-O-methylguanosine-3'-phosphorothioate
  modified_base 2: mod_base = OTHER; note = 2'-O-methylcytidine-3'-phosphorothioate
  modified_base 3: mod_base = OTHER; note = 2'-O-methyluridine-3'-phosphate
  modified_base 4: mod_base = OTHER; note = 2'-O-methylguanosine-3'-phosphate
  modified_base 5: mod_base = OTHER; note = 2'-O-methylcytidine-3'-phosphate
  modified_base 6: mod_base = OTHER; note = 2'-O-hexadecyl-adenosine-3'-phosphate
  modified_base 7: mod_base = OTHER; note = 2'-deoxy-2'-fluoroguanosine-3'-phosphate
  modified_base 8: mod_base = OTHER; note = 2'-O-methylguanosine-3'-phosphate
  modified_base 9: mod_base = OTHER; note = 2'-deoxy-2'-fluoroadenosine-3'-phosphate
  modified_base 10: mod_base = OTHER; note = 2'-deoxy-2'-fluorouridine-3'-phosphate
  modified_base 11: mod_base = OTHER; note = 2'-deoxy-2'-fluorouridine-3'-phosphate
  modified_base 12: mod_base = OTHER; note = 2'-O-methyluridine-3'-phosphate
  modified_base 13: mod_base = OTHER; note = 2'-O-methylcytidine-3'-phosphate
  modified_base 14: mod_base = OTHER; note = 2'-O-methyluridine-3'-phosphate
  modified_base 15: mod_base = OTHER; note = 2'-O-methyluridine-3'-phosphate
  modified_base 16: mod_base = OTHER; note = 2'-O-methylguanosine-3'-phosphate
  modified_base 17: mod_base = OTHER; note = 2'-O-methylguanosine-3'-phosphate
  modified_base 18: mod_base = OTHER; note = 2'-O-methylguanosine-3'-phosphate
  modified_base 19: mod_base = OTHER; note = 2'-O-methyladenosine-3'-phosphorothioate
  modified_base 20: mod_base = OTHER; note = 2'-O-methylcytidine-3'-phosphorothioate
  modified_base 21: mod_base = OTHER; note = 2'-O-methyladenosine
gctgcaggatttcttgggaca

SEQ ID NO: 368 - RNA, 21 nt, synthetic construct
  source 1..21: mol_type = other RNA
  modified_base 1: mod_base = OTHER; note = 2'-O-methyluridine-3'-phosphorothioate
  modified_base 2: mod_base = OTHER; note = 2'-O-methyluridine-3'-phosphorothioate
  modified_base 3: mod_base = OTHER; note = 2'-O-methylcytidine-3'-phosphate
  modified_base 4: mod_base = OTHER; note = 2'-O-methylcytidine-3'-phosphate
  modified_base 5: mod_base = OTHER; note = 2'-O-methylcytidine-3'-phosphate
  modified_base 6: mod_base = OTHER; note = 2'-O-hexadecyl-uridine-3'-phosphate
  modified_base 7: mod_base = OTHER; note = 2'-deoxy-2'-fluorocytidine-3'-phosphate
  modified_base 8: mod_base = OTHER; note = 2'-O-methyluridine-3'-phosphate
  modified_base 9: mod_base = OTHER; note = 2'-deoxy-2'-fluorouridine-3'-phosphate
  modified_base 10: mod_base = OTHER; note = 2'-deoxy-2'-fluorouridine-3'-phosphate
  modified_base 11: mod_base = OTHER; note = 2'-deoxy-2'-fluorocytidine-3'-phosphate
  modified_base 12: mod_base = OTHER; note = 2'-O-methyladenosine-3'-phosphate
  modified_base 13: mod_base = OTHER; note = 2'-O-methyladenosine-3'-phosphate
  modified_base 14: mod_base = OTHER; note = 2'-O-methylguanosine-3'-phosphate
  modified_base 15: mod_base = OTHER; note = 2'-O-methylguanosine-3'-phosphate
  modified_base 16: mod_base = OTHER; note = 2'-O-methyladenosine-3'-phosphate
  modified_base 17: mod_base = OTHER; note = 2'-O-methylguanosine-3'-phosphate
  modified_base 18: mod_base = OTHER; note = 2'-O-methyladenosine-3'-phosphate
  modified_base 19: mod_base = OTHER; note = 2'-O-methyladenosine-3'-phosphorothioate
  modified_base 20: mod_base = OTHER; note = 2'-O-methylguanosine-3'-phosphorothioate
  modified_base 21: mod_base = OTHER; note = 2'-O-methyladenosine
ttccctctttcaaggagaaga

SEQ ID NO: 369 - RNA, 21 nt, synthetic construct
  source 1..21: mol_type = other RNA
  modified_base 1: mod_base = OTHER; note = 2'-O-methyluridine-3'-phosphorothioate
  modified_base 2: mod_base = OTHER; note = 2'-O-methylguanosine-3'-phosphorothioate
  modified_base 3: mod_base = OTHER; note = 2'-O-methyladenosine-3'-phosphate
  modified_base 4: mod_base = OTHER; note = 2'-O-methyluridine-3'-phosphate
  modified_base 5: mod_base = OTHER; note = 2'-O-methyluridine-3'-phosphate
  modified_base 6: mod_base = OTHER; note = 2'-O-hexadecyl-guanosine-3'-phosphate
  modified_base 7: mod_base = OTHER; note = 2'-deoxy-2'-fluorocytidine-3'-phosphate
  modified_base 8: mod_base = OTHER; note = 2'-O-methyladenosine-3'-phosphate
  modified_base 9: mod_base = OTHER; note = 2'-deoxy-2'-fluoroguanosine-3'-phosphate
  modified_base 10: mod_base = OTHER; note = 2'-deoxy-2'-fluorocytidine-3'-phosphate
  modified_base 11: mod_base = OTHER; note = 2'-deoxy-2'-fluorouridine-3'-phosphate
  modified_base 12: mod_base = OTHER; note = 2'-O-methyluridine-3'-phosphate
  modified_base 13: mod_base = OTHER; note = 2'-O-methylguanosine-3'-phosphate
  modified_base 14: mod_base = OTHER; note = 2'-O-methyluridine-3'-phosphate
  modified_base 15: mod_base = OTHER; note = 2'-O-methyladenosine-3'-phosphate
  modified_base 16: mod_base = OTHER; note = 2'-O-methyluridine-3'-phosphate
  modified_base 17: mod_base = OTHER; note = 2'-O-methyluridine-3'-phosphate
  modified_base 18: mod_base = OTHER; note = 2'-O-methylcytidine-3'-phosphate
  modified_base 19: mod_base = OTHER; note = 2'-O-methyluridine-3'-phosphorothioate
  modified_base 20: mod_base = OTHER; note = 2'-O-methyluridine-3'-phosphorothioate
  modified_base 21: mod_base = OTHER; note = 2'-O-methyladenosine
tgattgcagcttgtattctta

SEQ ID NO: 370 - RNA, 21 nt, synthetic construct
  source 1..21: mol_type = other RNA
  modified_base 1: mod_base = OTHER; note = 2'-O-methyluridine-3'-phosphorothioate
  modified_base 2: mod_base = OTHER; note = 2'-O-methyluridine-3'-phosphorothioate
  modified_base 3: mod_base = OTHER; note = 2'-O-methyluridine-3'-phosphate
  modified_base 4: mod_base = OTHER; note = 2'-O-methyladenosine-3'-phosphate
  modified_base 5: mod_base = OTHER; note = 2'-O-methylguanosine-3'-phosphate
  modified_base 6: mod_base = OTHER; note = 2'-O-hexadecyl-cytidine-3'-phosphate
  modified_base 7: mod_base = OTHER; note = 2'-deoxy-2'-fluorocytidine-3'-phosphate
  modified_base 8: mod_base = OTHER; note = 2'-O-methyluridine-3'-phosphate
  modified_base 9: mod_base = OTHER; note = 2'-deoxy-2'-fluorouridine-3'-phosphate
  modified_base 10: mod_base = OTHER; note = 2'-deoxy-2'-fluoroadenosine-3'-phosphate
  modified_base 11: mod_base = OTHER; note = 2'-deoxy-2'-fluorouridine-3'-phosphate
  modified_base 12: mod_base = OTHER; note = 2'-O-methyluridine-3'-phosphate
  modified_base 13: mod_base = OTHER; note = 2'-O-methyladenosine-3'-phosphate
  modified_base 14: mod_base = OTHER; note = 2'-O-methylcytidine-3'-phosphate
  modified_base 15: mod_base = OTHER; note = 2'-O-methyladenosine-3'-phosphate
  modified_base 16: mod_base = OTHER; note = 2'-O-methyladenosine-3'-phosphate
  modified_base 17: mod_base = OTHER; note = 2'-O-methyluridine-3'-phosphate
  modified_base 18: mod_base = OTHER; note = 2'-O-methylcytidine-3'-phosphate
  modified_base 19: mod_base = OTHER; note = 2'-O-methyluridine-3'-phosphorothioate
  modified_base 20: mod_base = OTHER; note = 2'-O-methyladenosine-3'-phosphorothioate
  modified_base 21: mod_base = OTHER; note = 2'-O-methyladenosine
tttagccttattacaatctaa

SEQ ID NO: 371 - RNA, 21 nt, synthetic construct
  source 1..21: mol_type = other RNA
  modified_base 1: mod_base = OTHER; note = 2'-O-methylcytidine-3'-phosphorothioate
  modified_base 2: mod_base = OTHER; note = 2'-O-methyluridine-3'-phosphorothioate
  modified_base 3: mod_base = OTHER; note = 2'-O-methyladenosine-3'-phosphate
  modified_base 4: mod_base = OTHER; note = 2'-O-methyluridine-3'-phosphate
  modified_base 5: mod_base = OTHER; note = 2'-O-methylguanosine-3'-phosphate
  modified_base 6: mod_base = OTHER; note = 2'-O-hexadecyl-uridine-3'-phosphate
  modified_base 7: mod_base = OTHER; note = 2'-deoxy-2'-fluoroguanosine-3'-phosphate
  modified_base 8: mod_base = OTHER; note = 2'-O-methylcytidine-3'-phosphate
  modified_base 9: mod_base = OTHER; note = 2'-deoxy-2'-fluorocytidine-3'-phosphate
  modified_base 10: mod_base = OTHER; note = 2'-deoxy-2'-fluorouridine-3'-phosphate
  modified_base 11: mod_base = OTHER; note = 2'-deoxy-2'-fluoroguanosine-3'-phosphate
  modified_base 12: mod_base = OTHER; note = 2'-O-methyladenosine-3'-phosphate
  modified_base 13: mod_base = OTHER; note = 2'-O-methylcytidine-3'-phosphate
  modified_base 14: mod_base = OTHER; note = 2'-O-methyladenosine-3'-phosphate
  modified_base 15: mod_base = OTHER; note = 2'-O-methyladenosine-3'-phosphate
  modified_base 16: mod_base = OTHER; note = 2'-O-methylcytidine-3'-phosphate
  modified_base 17: mod_base = OTHER; note = 2'-O-methyluridine-3'-phosphate
  modified_base 18: mod_base = OTHER; note = 2'-O-methylcytidine-3'-phosphate
  modified_base 19: mod_base = OTHER; note = 2'-O-methyladenosine-3'-phosphorothioate
  modified_base 20: mod_base = OTHER; note = 2'-O-methyladenosine-3'-phosphorothioate
  modified_base 21: mod_base = OTHER; note = 2'-O-methyladenosine
ctatgtgcctgacaactcaaa

SEQ ID NO: 372 - RNA, 21 nt, synthetic construct
  source 1..21: mol_type = other RNA
  modified_base 1: mod_base = OTHER; note = 2'-O-methylcytidine-3'-phosphorothioate
  modified_base 2: mod_base = OTHER; note = 2'-O-methyluridine-3'-phosphorothioate
  modified_base 3: mod_base = OTHER; note = 2'-O-methylcytidine-3'-phosphate
  modified_base 4: mod_base = OTHER; note = 2'-O-methylcytidine-3'-phosphate
  modified_base 5: mod_base = OTHER; note = 2'-O-methyladenosine-3'-phosphate
  modified_base 6: mod_base = OTHER; note = 2'-O-hexadecyl-adenosine-3'-phosphate
  modified_base 7: mod_base = OTHER; note = 2'-deoxy-2'-fluorocytidine-3'-phosphate
  modified_base 8: mod_base = OTHER; note = 2'-O-methyluridine-3'-phosphate
  modified_base 9: mod_base = OTHER; note = 2'-deoxy-2'-fluoroguanosine-3'-phosphate
  modified_base 10: mod_base = OTHER; note = 2'-deoxy-2'-fluoroadenosine-3'-phosphate
  modified_base 11: mod_base = OTHER; note = 2'-deoxy-2'-fluoroadenosine-3'-phosphate
  modified_base 12: mod_base = OTHER; note = 2'-O-methylcytidine-3'-phosphate
  modified_base 13: mod_base = OTHER; note = 2'-O-methyladenosine-3'-phosphate
  modified_base 14: mod_base = OTHER; note = 2'-O-methyladenosine-3'-phosphate
  modified_base 15: mod_base = OTHER; note = 2'-O-methylcytidine-3'-phosphate
  modified_base 16: mod_base = OTHER; note = 2'-O-methylcytidine-3'-phosphate
  modified_base 17: mod_base = OTHER; note = 2'-O-methyladenosine-3'-phosphate
  modified_base 18: mod_base = OTHER; note = 2'-O-methylguanosine-3'-phosphate
  modified_base 19: mod_base = OTHER; note = 2'-O-methyladenosine-3'-phosphorothioate
  modified_base 20: mod_base = OTHER; note = 2'-O-methylcytidine-3'-phosphorothioate
  modified_base 21: mod_base = OTHER; note = 2'-O-methyladenosine
ctccaactgaacaaccagaca

SEQ ID NO: 373 - RNA, 21 nt, synthetic construct
  source 1..21: mol_type = other RNA
  modified_base 1: mod_base = OTHER; note = 2'-O-methylcytidine-3'-phosphorothioate
  modified_base 2: mod_base = OTHER; note = 2'-O-methyladenosine-3'-phosphorothioate
  modified_base 3: mod_base = OTHER; note = 2'-O-methylguanosine-3'-phosphate
  modified_base 4: mod_base = OTHER; note = 2'-O-methyladenosine-3'-phosphate
  modified_base 5: mod_base = OTHER; note = 2'-O-methylcytidine-3'-phosphate
  modified_base 6: mod_base = OTHER; note = 2'-O-hexadecyl-adenosine-3'-phosphate
  modified_base 7: mod_base = OTHER; note = 2'-deoxy-2'-fluoroadenosine-3'-phosphate
  modified_base 8: mod_base = OTHER; note = 2'-O-methylcytidine-3'-phosphate
  modified_base 9: mod_base = OTHER; note = 2'-deoxy-2'-fluorouridine-3'-phosphate
  modified_base 10: mod_base = OTHER; note = 2'-deoxy-2'-fluorocytidine-3'-phosphate
  modified_base 11: mod_base = OTHER; note = 2'-deoxy-2'-fluorouridine-3'-phosphate
  modified_base 12: mod_base = OTHER; note = 2'-O-methylcytidine-3'-phosphate
  modified_base 13: mod_base = OTHER; note = 2'-O-methyladenosine-3'-phosphate
  modified_base 14: mod_base = OTHER; note = 2'-O-methyluridine-3'-phosphate
  modified_base 15: mod_base = OTHER; note = 2'-O-methylcytidine-3'-phosphate
  modified_base 16: mod_base = OTHER; note = 2'-O-methyladenosine-3'-phosphate
  modified_base 17: mod_base = OTHER; note = 2'-O-methyluridine-3'-phosphate
  modified_base 18: mod_base = OTHER; note = 2'-O-methylcytidine-3'-phosphate
  modified_base 19: mod_base = OTHER; note = 2'-O-methylcytidine-3'-phosphorothioate
  modified_base 20: mod_base = OTHER; note = 2'-O-methyluridine-3'-phosphorothioate
  modified_base 21: mod_base = OTHER; note = 2'-O-methyladenosine
cagacaactctcatcatccta

SEQ ID NO: 374 - RNA, 21 nt, synthetic construct
  source 1..21: mol_type = other RNA
  modified_base 1: mod_base = OTHER; note = 2'-O-methyladenosine-3'-phosphorothioate
  modified_base 2: mod_base = OTHER; note = 2'-O-methyluridine-3'-phosphorothioate
  modified_base 3: mod_base = OTHER; note = 2'-O-methylcytidine-3'-phosphate
  modified_base 4: mod_base = OTHER; note = 2'-O-methylcytidine-3'-phosphate
  modified_base 5: mod_base = OTHER; note = 2'-O-methyluridine-3'-phosphate
  modified_base 6: mod_base = OTHER; note = 2'-O-hexadecyl-cytidine-3'-phosphate
  modified_base 7: mod_base = OTHER; note = 2'-deoxy-2'-fluorocytidine-3'-phosphate
  modified_base 8: mod_base = OTHER; note = 2'-O-methyladenosine-3'-phosphate
  modified_base 9: mod_base = OTHER; note = 2'-deoxy-2'-fluoroguanosine-3'-phosphate
  modified_base 10: mod_base = OTHER; note = 2'-deoxy-2'-fluoroadenosine-3'-phosphate
  modified_base 11: mod_base = OTHER; note = 2'-deoxy-2'-fluoroguanosine-3'-phosphate
  modified_base 12: mod_base = OTHER; note = 2'-O-methyladenosine-3'-phosphate
  modified_base 13: mod_base = OTHER; note = 2'-O-methylguanosine-3'-phosphate
  modified_base 14: mod_base = OTHER; note = 2'-O-methyladenosine-3'-phosphate
  modified_base 15: mod_base = OTHER; note = 2'-O-methyladenosine-3'-phosphate
  modified_base 16: mod_base = OTHER; note = 2'-O-methyladenosine-3'-phosphate
  modified_base 17: mod_base = OTHER; note = 2'-O-methyladenosine-3'-phosphate
  modified_base 18: mod_base = OTHER; note = 2'-O-methyluridine-3'-phosphate
  modified_base 19: mod_base = OTHER; note = 2'-O-methyladenosine-3'-phosphorothioate
  modified_base 20: mod_base = OTHER; note = 2'-O-methylguanosine-3'-phosphorothioate
  modified_base 21: mod_base = OTHER; note = 2'-O-methyladenosine
atcctccagagagaaaataga

SEQ ID NO: 375 - RNA, 21 nt, synthetic construct
  source 1..21: mol_type = other RNA
  modified_base 1: mod_base = OTHER; note = 2'-O-methyladenosine-3'-phosphorothioate
  modified_base 2: mod_base = OTHER; note = 2'-O-methyladenosine-3'-phosphorothioate
  modified_base 3: mod_base = OTHER; note = 2'-O-methyluridine-3'-phosphate
  modified_base 4: mod_base = OTHER; note = 2'-O-methyladenosine-3'-phosphate
  modified_base 5: mod_base = OTHER; note = 2'-O-methylguanosine-3'-phosphate
  modified_base 6: mod_base = OTHER; note = 2'-O-hexadecyl-guanosine-3'-phosphate
  modified_base 7: mod_base = OTHER; note = 2'-deoxy-2'-fluorocytidine-3'-phosphate
  modified_base 8: mod_base = OTHER; note = 2'-O-methylcytidine-3'-phosphate
  modified_base 9: mod_base = OTHER; note = 2'-deoxy-2'-fluoroguanosine-3'-phosphate
  modified_base 10: mod_base = OTHER; note = 2'-deoxy-2'-fluorouridine-3'-phosphate
  modified_base 11: mod_base = OTHER; note = 2'-deoxy-2'-fluoroguanosine-3'-phosphate
  modified_base 12: mod_base = OTHER; note = 2'-O-methyluridine-3'-phosphate
  modified_base 13: mod_base = OTHER; note = 2'-O-methylcytidine-3'-phosphate
  modified_base 14: mod_base = OTHER; note = 2'-O-methyluridine-3'-phosphate
  modified_base 15: mod_base = OTHER; note = 2'-O-methylcytidine-3'-phosphate
  modified_base 16: mod_base = OTHER; note = 2'-O-methyladenosine-3'-phosphate
  modified_base 17: mod_base = OTHER; note = 2'-O-methyladenosine-3'-phosphate
  modified_base 18: mod_base = OTHER; note = 2'-O-methyladenosine-3'-phosphate
  modified_base 19: mod_base = OTHER; note = 2'-O-methylguanosine-3'-phosphorothioate
  modified_base 20: mod_base = OTHER; note = 2'-O-methyladenosine-3'-phosphorothioate
  modified_base 21: mod_base = OTHER; note = 2'-O-methyladenosine
aataggccgtgtctcaaagaa

SEQ ID NO: 376 - RNA, 21 nt, synthetic construct
  source 1..21: mol_type = other RNA
  modified_base 1: mod_base = OTHER; note = 2'-O-methyladenosine-3'-phosphorothioate
  modified_base 2: mod_base = OTHER; note = 2'-O-methyladenosine-3'-phosphorothioate
  modified_base 3: mod_base = OTHER; note = 2'-O-methyladenosine-3'-phosphate
  modified_base 4: mod_base = OTHER; note = 2'-O-methylguanosine-3'-phosphate
  modified_base 5: mod_base = OTHER; note = 2'-O-methyladenosine-3'-phosphate
  modified_base 6: mod_base = OTHER; note = 2'-O-hexadecyl-adenosine-3'-phosphate
  modified_base 7: mod_base = OTHER; note = 2'-deoxy-2'-fluoroadenosine-3'-phosphate
  modified_base 8: mod_base = OTHER; note = 2'-O-methylguanosine-3'-phosphate
  modified_base 9: mod_base = OTHER; note = 2'-deoxy-2'-fluoroguanosine-3'-phosphate
  modified_base 10: mod_base = OTHER; note = 2'-deoxy-2'-fluorouridine-3'-phosphate
  modified_base 11: mod_base = OTHER; note = 2'-deoxy-2'-fluorouridine-3'-phosphate
  modified_base 12: mod_base = OTHER; note = 2'-O-methylcytidine-3'-phosphate
  modified_base 13: mod_base = OTHER; note = 2'-O-methyluridine-3'-phosphate
  modified_base 14: mod_base = OTHER; note = 2'-O-methyluridine-3'-phosphate
  modified_base 15: mod_base = OTHER; note = 2'-O-methylguanosine-3'-phosphate
  modified_base 16: mod_base = OTHER; note = 2'-O-methylguanosine-3'-phosphate
  modified_base 17: mod_base = OTHER; note = 2'-O-methyluridine-3'-phosphate
  modified_base 18: mod_base = OTHER; note = 2'-O-methylcytidine-3'-phosphate
  modified_base 19: mod_base = OTHER; note = 2'-O-methyluridine-3'-phosphorothioate
  modified_base 20: mod_base = OTHER; note = 2'-O-methyladenosine-3'-phosphorothioate
  modified_base 21: mod_base = OTHER; note = 2'-O-methyladenosine
aaagaaaggttcttggtctaa

SEQ ID NO: 377 - RNA, 21 nt, synthetic construct
  source 1..21: mol_type = other RNA
  modified_base 1: mod_base = OTHER; note = 2'-O-methyluridine-3'-phosphorothioate
  modified_base 2: mod_base = OTHER; note = 2'-O-methylguanosine-3'-phosphorothioate
  modified_base 3: mod_base = OTHER; note = 2'-O-methylcytidine-3'-phosphate
  modified_base 4: mod_base = OTHER; note = 2'-O-methyluridine-3'-phosphate
  modified_base 5: mod_base = OTHER; note = 2'-O-methylguanosine-3'-phosphate
  modified_base 6: mod_base = OTHER; note = 2'-O-hexadecyl-cytidine-3'-phosphate
  modified_base 7: mod_base = OTHER; note = 2'-deoxy-2'-fluoroadenosine-3'-phosphate
  modified_base 8: mod_base = OTHER; note = 2'-O-methyladenosine-3'-phosphate
  modified_base 9: mod_base = OTHER; note = 2'-deoxy-2'-fluoroadenosine-3'-phosphate
  modified_base 10: mod_base = OTHER; note = 2'-deoxy-2'-fluoroguanosine-3'-phosphate
  modified_base 11: mod_base = OTHER; note = 2'-deoxy-2'-fluorouridine-3'-phosphate
  modified_base 12: mod_base = OTHER; note = 2'-O-methyluridine-3'-phosphate
  modified_base 13: mod_base = OTHER; note = 2'-O-methylguanosine-3'-phosphate
  modified_base 14: mod_base = OTHER; note = 2'-O-methylguanosine-3'-phosphate
  modified_base 15: mod_base = OTHER; note = 2'-O-methylcytidine-3'-phosphate
  modified_base 16: mod_base = OTHER; note = 2'-O-methylcytidine-3'-phosphate
  modified_base 17: mod_base = OTHER; note = 2'-O-methyladenosine-3'-phosphate
  modified_base 18: mod_base = OTHER; note = 2'-O-methyluridine-3'-phosphate
  modified_base 19: mod_base = OTHER; note = 2'-O-methylguanosine-3'-phosphorothioate
  modified_base 20: mod_base = OTHER; note = 2'-O-methyluridine-3'-phosphorothioate
  modified_base 21: mod_base = OTHER; note = 2'-O-methyladenosine
tgctgcaaagttggccatgta

SEQ ID NO: 378 - RNA, 21 nt, synthetic construct
  source 1..21: mol_type = other RNA
  modified_base 1: mod_base = OTHER; note = 2'-O-methyladenosine-3'-phosphorothioate
  modified_base 2: mod_base = OTHER; note = 2'-O-methyluridine-3'-phosphorothioate
  modified_base 3: mod_base = OTHER; note = 2'-O-methylguanosine-3'-phosphate
  modified_base 4: mod_base = OTHER; note = 2'-O-methyluridine-3'-phosphate
  modified_base 5: mod_base = OTHER; note = 2'-O-methyluridine-3'-phosphate
  modified_base 6: mod_base = OTHER; note = 2'-O-hexadecyl-uridine-3'-phosphate
  modified_base 7: mod_base = OTHER; note = 2'-deoxy-2'-fluorocytidine-3'-phosphate
  modified_base 8: mod_base = OTHER; note = 2'-O-methyladenosine-3'-phosphate
  modified_base 9: mod_base = OTHER; note = 2'-deoxy-2'-fluorocytidine-3'-phosphate
  modified_base 10: mod_base = OTHER; note = 2'-deoxy-2'-fluoroadenosine-3'-phosphate
  modified_base 11: mod_base = OTHER; note = 2'-deoxy-2'-fluoroguanosine-3'-phosphate
  modified_base 12: mod_base = OTHER; note = 2'-O-methylguanosine-3'-phosphate
  modified_base 13: mod_base = OTHER; note = 2'-O-methylguanosine-3'-phosphate
  modified_base 14: mod_base = OTHER; note = 2'-O-methyladenosine-3'-phosphate
  modified_base 15: mod_base = OTHER; note = 2'-O-methyladenosine-3'-phosphate
  modified_base 16: mod_base = OTHER; note = 2'-O-methyladenosine-3'-phosphate
  modified_base 17: mod_base = OTHER; note = 2'-O-methylcytidine-3'-phosphate
  modified_base 18: mod_base = OTHER; note = 2'-O-methyluridine-3'-phosphate
  modified_base 19: mod_base = OTHER; note = 2'-O-methyluridine-3'-phosphorothioate
  modified_base 20: mod_base = OTHER; note = 2'-O-methyluridine-3'-phosphorothioate
  modified_base 21: mod_base = OTHER; note = 2'-O-methyladenosine
atgtttcacagggaaacttta

SEQ ID NO: 379 - RNA, 21 nt, synthetic construct
  source 1..21: mol_type = other RNA
  modified_base 1: mod_base = OTHER; note = 2'-O-methylcytidine-3'-phosphorothioate
  modified_base 2: mod_base = OTHER; note = 2'-O-methyluridine-3'-phosphorothioate
  modified_base 3: mod_base = OTHER; note = 2'-O-methylguanosine-3'-phosphate
  modified_base 4: mod_base = OTHER; note = 2'-O-methylcytidine-3'-phosphate
  modified_base 5: mod_base = OTHER; note = 2'-O-methyluridine-3'-phosphate
  modified_base 6: mod_base = OTHER; note = 2'-O-hexadecyl-uridine-3'-phosphate
  modified_base 7: mod_base = OTHER; note = 2'-deoxy-2'-fluoroadenosine-3'-phosphate
  modified_base 8: mod_base = OTHER; note = 2'-O-methyluridine-3'-phosphate
  modified_base 9: mod_base = OTHER; note = 2'-deoxy-2'-fluoroguanosine-3'-phosphate
  modified_base 10: mod_base = OTHER; note = 2'-deoxy-2'-fluoroadenosine-3'-phosphate
  modified_base 11: mod_base = OTHER; note = 2'-deoxy-2'-fluoroguanosine-3'-phosphate
  modified_base 12: mod_base = OTHER; note = 2'-O-methyladenosine-3'-phosphate
  modified_base 13: mod_base = OTHER; note = 2'-O-methyluridine-3'-phosphate
  modified_base 14: mod_base = OTHER; note = 2'-O-methyluridine-3'-phosphate
  modified_base 15: mod_base = OTHER; note = 2'-O-methylcytidine-3'-phosphate
  modified_base 16: mod_base = OTHER; note = 2'-O-methylcytidine-3'-phosphate
  modified_base 17: mod_base = OTHER; note = 2'-O-methyladenosine-3'-phosphate
  modified_base 18: mod_base = OTHER; note = 2'-O-methyladenosine-3'-phosphate
  modified_base 19: mod_base = OTHER; note = 2'-O-methyladenosine-3'-phosphorothioate
  modified_base 20: mod_base = OTHER; note = 2'-O-methyladenosine-3'-phosphorothioate
  modified_base 21: mod_base = OTHER; note = 2'-O-methyladenosine
ctgcttatgagattccaaaaa

SEQ ID NO: 380 - RNA, 21 nt, synthetic construct
  source 1..21: mol_type = other RNA
  modified_base 1: mod_base = OTHER; note = 2'-O-methylcytidine-3'-phosphorothioate
  modified_base 2: mod_base = OTHER; note = 2'-O-methyladenosine-3'-phosphorothioate
  modified_base 3: mod_base = OTHER; note = 2'-O-methyladenosine-3'-phosphate
  modified_base 4: mod_base = OTHER; note = 2'-O-methyladenosine-3'-phosphate
  modified_base 5: mod_base = OTHER; note = 2'-O-methyladenosine-3'-phosphate
  modified_base 6: mod_base = OTHER; note = 2'-O-hexadecyl-uridine-3'-phosphate
  modified_base 7: mod_base = OTHER; note = 2'-deoxy-2'-fluoroguanosine-3'-phosphate
  modified_base 8: mod_base = OTHER; note = 2'-O-methyladenosine-3'-phosphate
  modified_base 9: mod_base = OTHER; note = 2'-deoxy-2'-fluoroadenosine-3'-phosphate
  modified_base 10: mod_base = OTHER; note = 2'-deoxy-2'-fluoroguanosine-3'-phosphate
  modified_base 11: mod_base = OTHER; note = 2'-deoxy-2'-fluorouridine-3'-phosphate
  modified_base 12: mod_base = OTHER; note = 2'-O-methylguanosine-3'-phosphate
  modified_base 13: mod_base = OTHER; note = 2'-O-methyluridine-3'-phosphate
  modified_base 14: mod_base = OTHER; note = 2'-O-methyluridine-3'-phosphate
  modified_base 15: mod_base = OTHER; note = 2'-O-methylguanosine-3'-phosphate
  modified_base 16: mod_base = OTHER; note = 2'-O-methylguanosine-3'-phosphate
  modified_base 17: mod_base = OTHER; note = 2'-O-methylcytidine-3'-phosphate
  modified_base 18: mod_base = OTHER; note = 2'-O-methylcytidine-3'-phosphate
  modified_base 19: mod_base = OTHER; note = 2'-O-methyladenosine-3'-phosphorothioate
  modified_base 20: mod_base = OTHER; note = 2'-O-methyladenosine-3'-phosphorothioate
  modified_base 21: mod_base = OTHER; note = 2'-O-methyladenosine
caaaatgaagtgttggccaaa

SEQ ID NO: 381 - RNA, 21 nt, synthetic construct
  source 1..21: mol_type = other RNA
  modified_base 1: mod_base = OTHER; note = 2'-O-methylcytidine-3'-phosphorothioate
  modified_base 2: mod_base = OTHER; note = 2'-O-methylcytidine-3'-phosphorothioate
  modified_base 3: mod_base = OTHER; note = 2'-O-methyladenosine-3'-phosphate
  modified_base 4: mod_base = OTHER; note = 2'-O-methyluridine-3'-phosphate
  modified_base 5: mod_base = OTHER; note = 2'-O-methylcytidine-3'-phosphate
  modified_base 6: mod_base = OTHER; note = 2'-O-hexadecyl-cytidine-3'-phosphate
  modified_base 7: mod_base = OTHER; note = 2'-deoxy-2'-fluorouridine-3'-phosphate
  modified_base 8: mod_base = OTHER; note = 2'-O-methylguanosine-3'-phosphate
  modified_base 9: mod_base = OTHER; note = 2'-deoxy-2'-fluoroguanosine-3'-phosphate
  modified_base 10: mod_base = OTHER; note = 2'-deoxy-2'-fluoroadenosine-3'-phosphate
  modified_base 11: mod_base = OTHER; note = 2'-deoxy-2'-fluorouridine-3'-phosphate
  modified_base 12: mod_base = OTHER; note = 2'-O-methyluridine-3'-phosphate
  modified_base 13: mod_base = OTHER; note = 2'-O-methyluridine-3'-phosphate
  modified_base 14: mod_base = OTHER; note = 2'-O-methyluridine-3'-phosphate
  modified_base 15: mod_base = OTHER; note = 2'-O-methylcytidine-3'-phosphate
  modified_base 16: mod_base = OTHER; note = 2'-O-methylcytidine-3'-phosphate
  modified_base 17: mod_base = OTHER; note = 2'-O-methylcytidine-3'-phosphate
  modified_base 18: mod_base = OTHER; note = 2'-O-methyladenosine-3'-phosphate
  modified_base 19: mod_base = OTHER; note = 2'-O-methylguanosine-3'-phosphorothioate
  modified_base 20: mod_base = OTHER; note = 2'-O-methyluridine-3'-phosphorothioate
  modified_base 21: mod_base = OTHER; note = 2'-O-methyladenosine
ccatcctggattttcccagta

SEQ ID NO: 382 - RNA, 21 nt, synthetic construct
  source 1..21: mol_type = other RNA
  modified_base 1: mod_base = OTHER; note = 2'-O-methylguanosine-3'-phosphorothioate
  modified_base 2: mod_base = OTHER; note = 2'-O-methyluridine-3'-phosphorothioate
  modified_base 3: mod_base = OTHER; note = 2'-O-methylguanosine-3'-phosphate
  modified_base 4: mod_base = OTHER; note = 2'-O-methylguanosine-3'-phosphate
  modified_base 5: mod_base = OTHER; note = 2'-O-methylcytidine-3'-phosphate
  modified_base 6: mod_base = OTHER; note = 2'-O-hexadecyl-uridine-3'-phosphate
  modified_base 7: mod_base = OTHER; note = 2'-deoxy-2'-fluorouridine-3'-phosphate
  modified_base 8: mod_base = OTHER; note = 2'-O-methylcytidine-3'-phosphate
  modified_base 9: mod_base = OTHER; note = 2'-deoxy-2'-fluorocytidine-3'-phosphate
  modified_base 10: mod_base = OTHER; note = 2'-deoxy-2'-fluorocytidine-3'-phosphate
  modified_base 11: mod_base = OTHER; note = 2'-deoxy-2'-fluorouridine-3'-phosphate
  modified_base 12: mod_base = OTHER; note = 2'-O-methyluridine-3'-phosphate
  modified_base 13: mod_base = OTHER; note = 2'-O-methylcytidine-3'-phosphate
  modified_base 14: mod_base = OTHER; note = 2'-O-methylcytidine-3'-phosphate
  modified_base 15: mod_base = OTHER; note = 2'-O-methyluridine-3'-phosphate
  modified_base 16: mod_base = OTHER; note = 2'-O-methylguanosine-3'-phosphate
  modified_base 17: mod_base = OTHER; note = 2'-O-methylcytidine-3'-phosphate
  modified_base 18: mod_base = OTHER; note = 2'-O-methyluridine-3'-phosphate
  modified_base 19: mod_base = OTHER; note = 2'-O-methylcytidine-3'-phosphorothioate
  modified_base 20: mod_base = OTHER; note = 2'-O-methylguanosine-3'-phosphorothioate
  modified_base 21: mod_base = OTHER; note = 2'-O-methyladenosine
gtggcttcccttcctgctcga

SEQ ID NO: 383 - RNA, 21 nt, synthetic construct
  source 1..21: mol_type = other RNA
  modified_base 1: mod_base = OTHER; note = 2'-O-methyladenosine-3'-phosphorothioate
  modified_base 2: mod_base = OTHER; note = 2'-O-methyladenosine-3'-phosphorothioate
  modified_base 3: mod_base = OTHER; note = 2'-O-methyladenosine-3'-phosphate
  modified_base 4: mod_base = OTHER; note = 2'-O-methylguanosine-3'-phosphate
  modified_base 5: mod_base = OTHER; note = 2'-O-methylcytidine-3'-phosphate
  modified_base 6: mod_base = OTHER; note = 2'-O-hexadecyl-uridine-3'-phosphate
  modified_base 7: mod_base = OTHER; note = 2'-deoxy-2'-fluorouridine-3'-phosphate
  modified_base 8: mod_base = OTHER; note = 2'-O-methyladenosine-3'-phosphate
  modified_base 9: mod_base = OTHER; note = 2'-deoxy-2'-fluoroadenosine-3'-phosphate
  modified_base 10: mod_base = OTHER; note = 2'-deoxy-2'-fluorocytidine-3'-phosphate
  modified_base 11: mod_base = OTHER; note = 2'-deoxy-2'-fluorocytidine-3'-phosphate
  modified_base 12: mod_base = OTHER; note = 2'-O-methyluridine-3'-phosphate
  modified_base 13: mod_base = OTHER; note = 2'-O-methylcytidine-3'-phosphate
  modified_base 14: mod_base = OTHER; note = 2'-O-methyluridine-3'-phosphate
  modified_base 15: mod_base = OTHER; note = 2'-O-methylcytidine-3'-phosphate
  modified_base 16: mod_base = OTHER; note = 2'-O-methyluridine-3'-phosphate
  modified_base 17: mod_base = OTHER; note = 2'-O-methyluridine-3'-phosphate
  modified_base 18: mod_base = OTHER; note = 2'-O-methylcytidine-3'-phosphate
  modified_base 19: mod_base = OTHER; note = 2'-O-methyluridine-3'-phosphorothioate
  modified_base 20: mod_base = OTHER; note = 2'-O-methylcytidine-3'-phosphorothioate
  modified_base 21: mod_base = OTHER; note = 2'-O-methyladenosine
aaagcttaacctctcttctca

SEQ ID NO: 384 - RNA, 21 nt, synthetic construct
  source 1..21: mol_type = other RNA
  modified_base 1: mod_base = OTHER; note = 2'-O-methylcytidine-3'-phosphorothioate
  modified_base 2: mod_base = OTHER; note = 2'-O-methylcytidine-3'-phosphorothioate
  modified_base 3: mod_base = OTHER; note = 2'-O-methyladenosine-3'-phosphate
  modified_base 4: mod_base = OTHER; note = 2'-O-methyladenosine-3'-phosphate
  modified_base 5: mod_base = OTHER; note = 2'-O-methyladenosine-3'-phosphate
  modified_base 6: mod_base = OTHER; note = 2'-O-hexadecyl-cytidine-3'-phosphate
  modified_base 7: mod_base = OTHER; note = 2'-deoxy-2'-fluorocytidine-3'-phosphate
  modified_base 8: mod_base = OTHER; note = 2'-O-methyluridine-3'-phosphate
  modified_base 9: mod_base = OTHER; note = 2'-deoxy-2'-fluorouridine-3'-phosphate
  modified_base 10: mod_base = OTHER; note = 2'-deoxy-2'-fluorouridine-3'-phosphate
  modified_base 11: mod_base = OTHER; note = 2'-deoxy-2'-fluorocytidine-3'-phosphate
  modified_base 12: mod_base = OTHER; note = 2'-O-methyladenosine-3'-phosphate
  modified_base 13: mod_base = OTHER; note = 2'-O-methylcytidine-3'-phosphate
  modified_base 14: mod_base = OTHER; note = 2'-O-methylcytidine-3'-phosphate
  modified_base 15: mod_base = OTHER; note = 2'-O-methyluridine-3'-phosphate
  modified_base 16: mod_base = OTHER; note = 2'-O-methyluridine-3'-phosphate
  modified_base 17: mod_base = OTHER; note = 2'-O-methylguanosine-3'-phosphate
  modified_base 18: mod_base = OTHER; note = 2'-O-methyladenosine-3'-phosphate
  modified_base 19: mod_base = OTHER; note = 2'-O-methyladenosine-3'-phosphorothioate
  modified_base 20: mod_base = OTHER; note = 2'-O-methyluridine-3'-phosphorothioate
  modified_base 21: mod_base = OTHER; note = 2'-O-methyladenosine
ccaaacctttcaccttgaata

SEQ ID NO: 385 - RNA, 21 nt, synthetic construct
  source 1..21: mol_type = other RNA
  modified_base 1: mod_base = OTHER; note = 2'-O-methyluridine-3'-phosphorothioate
  modified_base 2: mod_base = OTHER; note = 2'-O-methylguanosine-3'-phosphorothioate
  modified_base 3: mod_base = OTHER; note = 2'-O-methyladenosine-3'-phosphate
  modified_base 4: mod_base = OTHER; note = 2'-O-methyladenosine-3'-phosphate
  modified_base 5: mod_base = OTHER; note = 2'-O-methyluridine-3'-phosphate
  modified_base 6: mod_base = OTHER; note = 2'-O-hexadecyl-guanosine-3'-phosphate
  modified_base 7: mod_base = OTHER; note = 2'-deoxy-2'-fluoroguanosine-3'-phosphate
  modified_base 8: mod_base = OTHER; note = 2'-O-methylguanosine-3'-phosphate
  modified_base 9: mod_base = OTHER; note = 2'-deoxy-2'-fluorouridine-3'-phosphate
  modified_base 10: mod_base = OTHER; note = 2'-deoxy-2'-fluoroadenosine-3'-phosphate
  modified_base 11: mod_base = OTHER; note = 2'-deoxy-2'-fluoroadenosine-3'-phosphate
  modified_base 12: mod_base = OTHER; note = 2'-O-methyluridine-3'-phosphate
  modified_base 13: mod_base = OTHER; note = 2'-O-methylguanosine-3'-phosphate
  modified_base 14: mod_base = OTHER; note = 2'-O-methyluridine-3'-phosphate
  modified_base 15: mod_base = OTHER; note = 2'-O-methyluridine-3'-phosphate
  modified_base 16: mod_base = OTHER; note = 2'-O-methyluridine-3'-phosphate
  modified_base 17: mod_base = OTHER; note = 2'-O-methylguanosine-3'-phosphate
  modified_base 18: mod_base = OTHER; note = 2'-O-methylguanosine-3'-phosphate
  modified_base 19: mod_base = OTHER; note = 2'-O-methyluridine-3'-phosphorothioate
  modified_base 20: mod_base = OTHER; note = 2'-O-methylguanosine-3'-phosphorothioate
  modified_base 21: mod_base = OTHER; note = 2'-O-methyladenosine
tgaatgggtaatgtttggtga

SEQ ID NO: 386 - RNA, 21 nt, synthetic construct
  source 1..21: mol_type = other RNA
  modified_base 1: mod_base = OTHER; note = 2'-O-methyluridine-3'-phosphorothioate
  modified_base 2: mod_base = OTHER; note = 2'-O-methylguanosine-3'-phosphorothioate
  modified_base 3: mod_base = OTHER; note = 2'-O-methyluridine-3'-phosphate
  modified_base 4: mod_base = OTHER; note = 2'-O-methyluridine-3'-phosphate
  modified_base 5: mod_base = OTHER; note = 2'-O-methylcytidine-3'-phosphate
  modified_base 6: mod_base = OTHER; note = 2'-O-hexadecyl-cytidine-3'-phosphate
  modified_base 7: mod_base = OTHER; note = 2'-deoxy-2'-fluorouridine-3'-phosphate
  modified_base 8: mod_base = OTHER; note = 2'-O-methyluridine-3'-phosphate
  modified_base 9: mod_base = OTHER; note = 2'-deoxy-2'-fluorocytidine-3'-phosphate
  modified_base 10: mod_base = OTHER; note = 2'-deoxy-2'-fluorouridine-3'-phosphate
  modified_base 11: mod_base = OTHER; note = 2'-deoxy-2'-fluorouridine-3'-phosphate
  modified_base 12: mod_base = OTHER; note = 2'-O-methylguanosine-3'-phosphate
  modified_base 13: mod_base = OTHER; note = 2'-O-methylguanosine-3'-phosphate
  modified_base 14: mod_base = OTHER; note = 2'-O-methyladenosine-3'-phosphate
  modified_base 15: mod_base = OTHER; note = 2'-O-methylguanosine-3'-phosphate
  modified_base 16: mod_base = OTHER; note = 2'-O-methyladenosine-3'-phosphate
  modified_base 17: mod_base = OTHER; note = 2'-O-methyladenosine-3'-phosphate
  modified_base 18: mod_base = OTHER; note = 2'-O-methylguanosine-3'-phosphate
  modified_base 19: mod_base = OTHER; note = 2'-O-methylcytidine-3'-phosphorothioate
  modified_base 20: mod_base = OTHER; note = 2'-O-methylcytidine-3'-phosphorothioate
  modified_base 21: mod_base = OTHER; note = 2'-O-methyladenosine
tgttccttcttggagaagcca

SEQ ID NO: 387 - RNA, 21 nt, synthetic construct
  source 1..21: mol_type = other RNA
  modified_base 1: mod_base = OTHER; note = 2'-O-methylguanosine-3'-phosphorothioate
  modified_base 2: mod_base = OTHER; note = 2'-O-methylcytidine-3'-phosphorothioate
  modified_base 3: mod_base = OTHER; note = 2'-O-methylcytidine-3'-phosphate
  modified_base 4: mod_base = OTHER; note = 2'-O-methyluridine-3'-phosphate
  modified_base 5: mod_base = OTHER; note = 2'-O-methyluridine-3'-phosphate
  modified_base 6: mod_base = OTHER; note = 2'-O-hexadecyl-guanosine-3'-phosphate
  modified_base 7: mod_base = OTHER; note = 2'-deoxy-2'-fluoroadenosine-3'-phosphate
  modified_base 8: mod_base = OTHER; note = 2'-O-methylguanosine-3'-phosphate
  modified_base 9: mod_base = OTHER; note = 2'-deoxy-2'-fluorouridine-3'-phosphate
  modified_base 10: mod_base = OTHER; note = 2'-deoxy-2'-fluorocytidine-3'-phosphate
  modified_base 11: mod_base = OTHER; note = 2'-deoxy-2'-fluoroguanosine-3'-phosphate
  modified_base 12: mod_base = OTHER; note = 2'-O-methylguanosine-3'-phosphate
  modified_base 13: mod_base = OTHER; note = 2'-O-methyladenosine-3'-phosphate
  modified_base 14: mod_base = OTHER; note = 2'-O-methylcytidine-3'-phosphate
  modified_base 15: mod_base = OTHER; note = 2'-O-methylcytidine-3'-phosphate
  modified_base 16: mod_base = OTHER; note = 2'-O-methyladenosine-3'-phosphate
  modified_base 17: mod_base = OTHER; note = 2'-O-methyluridine-3'-phosphate
  modified_base 18: mod_base = OTHER; note = 2'-O-methyluridine-3'-phosphate
  modified_base 19: mod_base = OTHER; note = 2'-O-methyluridine-3'-phosphorothioate
  modified_base 20: mod_base = OTHER; note = 2'-O-methyluridine-3'-phosphorothioate
  modified_base 21: mod_base = OTHER; note = 2'-O-methyladenosine
gccttgagtcggaccatttta

SEQ ID NO: 388 - RNA, 21 nt, synthetic construct
  source 1..21: mol_type = other RNA
  modified_base 1: mod_base = OTHER; note = 2'-O-methyladenosine-3'-phosphorothioate
  modified_base 2: mod_base = OTHER; note = 2'-O-methyladenosine-3'-phosphorothioate
  modified_base 3: mod_base = OTHER; note = 2'-O-methylguanosine-3'-phosphate
  modified_base 4: mod_base = OTHER; note = 2'-O-methylguanosine-3'-phosphate
  modified_base 5: mod_base = OTHER; note = 2'-O-methyladenosine-3'-phosphate
  modified_base 6: mod_base = OTHER; note = 2'-O-hexadecyl-uridine-3'-phosphate
  modified_base 7: mod_base = OTHER; note = 2'-deoxy-2'-fluoroguanosine-3'-phosphate
  modified_base 8: mod_base = OTHER; note = 2'-O-methyladenosine-3'-phosphate
  modified_base 9: mod_base = OTHER; note = 2'-deoxy-2'-fluoroadenosine-3'-phosphate
  modified_base 10: mod_base = OTHER; note = 2'-deoxy-2'-fluoroguanosine-3'-phosphate
  modified_base 11: mod_base = OTHER; note = 2'-deoxy-2'-fluoroadenosine-3'-phosphate
  modified_base 12: mod_base = OTHER; note = 2'-O-methyladenosine-3'-phosphate
  modified_base 13: mod_base = OTHER; note = 2'-O-methylguanosine-3'-phosphate
  modified_base 14: mod_base = OTHER; note = 2'-O-methyluridine-3'-phosphate
  modified_base 15: mod_base = OTHER; note = 2'-O-methylguanosine-3'-phosphate
  modified_base 16: mod_base = OTHER; note = 2'-O-methyladenosine-3'-phosphate
  modified_base 17: mod_base = OTHER; note = 2'-O-methyladenosine-3'-phosphate
  modified_base 18: mod_base = OTHER; note = 2'-O-methyladenosine-3'-phosphate
  modified_base 19: mod_base = OTHER; note = 2'-O-methyladenosine-3'-phosphorothioate
  modified_base 20: mod_base = OTHER; note = 2'-O-methyluridine-3'-phosphorothioate
  modified_base 21: mod_base = OTHER; note = 2'-O-methyladenosine
aaggatgaagaagtgaaaata

SEQ ID NO: 389 - RNA, 21 nt, synthetic construct
  source 1..21: mol_type = other RNA
  modified_base 1: mod_base = OTHER; note = 2'-O-methyladenosine-3'-phosphorothioate
  modified_base 2: mod_base = OTHER; note = 2'-O-methyluridine-3'-phosphorothioate
  modified_base 3: mod_base = OTHER; note = 2'-O-methylguanosine-3'-phosphate
  modified_base 4: mod_base = OTHER; note = 2'-O-methyladenosine-3'-phosphate
  modified_base 5: mod_base = OTHER; note = 2'-O-methylcytidine-3'-phosphate
  modified_base 6: mod_base = OTHER; note = 2'-O-hexadecyl-adenosine-3'-phosphate
  modified_base 7: mod_base = OTHER; note = 2'-deoxy-2'-fluoroadenosine-3'-phosphate
  modified_base 8: mod_base = OTHER; note = 2'-O-methyluridine-3'-phosphate
  modified_base 9: mod_base = OTHER; note = 2'-deoxy-2'-fluoroadenosine-3'-phosphate
  modified_base 10: mod_base = OTHER; note = 2'-deoxy-2'-fluoroadenosine-3'-phosphate
  modified_base 11: mod_base = OTHER; note = 2'-deoxy-2'-fluorouridine-3'-phosphate
  modified_base 12: mod_base = OTHER; note = 2'-O-methylguanosine-3'-phosphate
  modified_base 13: mod_base = OTHER; note = 2'-O-methyladenosine-3'-phosphate
  modified_base 14: mod_base = OTHER; note = 2'-O-methylcytidine-3'-phosphate
  modified_base 15: mod_base = OTHER; note = 2'-O-methyluridine-3'-phosphate
  modified_base 16: mod_base = OTHER; note = 2'-O-methylcytidine-3'-phosphate
  modified_base 17: mod_base = OTHER; note = 2'-O-methyluridine-3'-phosphate
  modified_base 18: mod_base = OTHER; note = 2'-O-methylcytidine-3'-phosphate
  modified_base 19: mod_base = OTHER; note = 2'-O-methyladenosine-3'-phosphorothioate
  modified_base 20: mod_base = OTHER; note = 2'-O-methyladenosine-3'-phosphorothioate
  modified_base 21: mod_base = OTHER; note = 2'-O-methyladenosine
atgacaataatgactctcaaa

SEQ ID NO: 390 - RNA, 21 nt, synthetic construct
  source 1..21: mol_type = other RNA
  modified_base 1: mod_base = OTHER; note = 2'-O-methyladenosine-3'-phosphorothioate
  modified_base 2: mod_base = OTHER; note = 2'-O-methylcytidine-3'-phosphorothioate
  modified_base 3: mod_base = OTHER; note = 2'-O-methyladenosine-3'-phosphate
  modified_base 4: mod_base = OTHER; note = 2'-O-methyluridine-3'-phosphate
  modified_base 5: mod_base = OTHER; note = 2'-O-methylguanosine-3'-phosphate
  modified_base 6: mod_base = OTHER; note = 2'-O-hexadecyl-guanosine-3'-phosphate
  modified_base 7: mod_base = OTHER; note = 2'-deoxy-2'-fluorocytidine-3'-phosphate
  modified_base 8: mod_base = OTHER; note = 2'-O-methyladenosine-3'-phosphate
  modified_base 9: mod_base = OTHER; note = 2'-deoxy-2'-fluoroadenosine-3'-phosphate
  modified_base 10: mod_base = OTHER; note = 2'-deoxy-2'-fluoroadenosine-3'-phosphate
  modified_base 11: mod_base = OTHER; note = 2'-deoxy-2'-fluorouridine-3'-phosphate
  modified_base 12: mod_base = OTHER; note = 2'-O-methylguanosine-3'-phosphate
  modified_base 13: mod_base = OTHER; note = 2'-O-methyluridine-3'-phosphate
  modified_base 14: mod_base = OTHER; note = 2'-O-methyladenosine-3'-phosphate
  modified_base 15: mod_base = OTHER; note = 2'-O-methylguanosine-3'-phosphate
  modified_base 16: mod_base = OTHER; note = 2'-O-methyladenosine-3'-phosphate
  modified_base 17: mod_base = OTHER; note = 2'-O-methyladenosine-3'-phosphate
  modified_base 18: mod_base = OTHER; note = 2'-O-methylcytidine-3'-phosphate
  modified_base 19: mod_base = OTHER; note = 2'-O-methyluridine-3'-phosphorothioate
  modified_base 20: mod_base = OTHER; note = 2'-O-methylguanosine-3'-phosphorothioate
  modified_base 21: mod_base = OTHER; note = 2'-O-methyladenosine
acatggcaaatgtagaactga

SEQ ID NO: 391 - RNA, 21 nt, synthetic construct
  source 1..21: mol_type = other RNA
  modified_base 1: mod_base = OTHER; note = 2'-O-methylcytidine-3'-phosphorothioate
  modified_base 2: mod_base = OTHER; note = 2'-O-methyluridine-3'-phosphorothioate
  modified_base 3: mod_base = OTHER; note = 2'-O-methylguanosine-3'-phosphate
  modified_base 4: mod_base = OTHER; note = 2'-O-methyladenosine-3'-phosphate
  modified_base 5: mod_base = OTHER; note = 2'-O-methylcytidine-3'-phosphate
  modified_base 6: mod_base = OTHER; note = 2'-O-hexadecyl-uridine-3'-phosphate
  modified_base 7: mod_base = OTHER; note = 2'-deoxy-2'-fluorouridine-3'-phosphate
  modified_base 8: mod_base = OTHER; note = 2'-O-methyladenosine-3'-phosphate
  modified_base 9: mod_base = OTHER; note = 2'-deoxy-2'-fluoroadenosine-3'-phosphate
  modified_base 10: mod_base = OTHER; note = 2'-deoxy-2'-fluoroadenosine-3'-phosphate
  modified_base 11: mod_base = OTHER; note = 2'-deoxy-2'-fluorouridine-3'-phosphate
  modified_base 12: mod_base = OTHER; note = 2'-O-methyluridine-3'-phosphate
  modified_base 13: mod_base = OTHER; note = 2'-O-methylguanosine-3'-phosphate
  modified_base 14: mod_base = OTHER; note = 2'-O-methyladenosine-3'-phosphate
  modified_base 15: mod_base = OTHER; note = 2'-O-methyladenosine-3'-phosphate
  modified_base 16: mod_base = OTHER; note = 2'-O-methylcytidine-3'-phosphate
  modified_base 17: mod_base = OTHER; note = 2'-O-methyladenosine-3'-phosphate
  modified_base 18: mod_base = OTHER; note = 2'-O-methyladenosine-3'-phosphate
  modified_base 19: mod_base = OTHER; note = 2'-O-methyladenosine-3'-phosphorothioate
  modified_base 20: mod_base = OTHER; note = 2'-O-methylcytidine-3'-phosphorothioate
  modified_base 21: mod_base = OTHER; note = 2'-O-methyladenosine
ctgacttaaattgaacaaaca

SEQ ID NO: 392 - RNA, 21 nt, synthetic construct
  source 1..21: mol_type = other RNA
  modified_base 1: mod_base = OTHER; note = 2'-O-methyladenosine-3'-phosphorothioate
  modified_base 2: mod_base = OTHER; note = 2'-O-methylcytidine-3'-phosphorothioate
  modified_base 3: mod_base = OTHER; note = 2'-O-methylcytidine-3'-phosphate
  modified_base 4: mod_base = OTHER; note = 2'-O-methyluridine-3'-phosphate
  modified_base 5: mod_base = OTHER; note = 2'-O-methylcytidine-3'-phosphate
  modified_base 6: mod_base = OTHER; note = 2'-O-hexadecyl-uridine-3'-phosphate
  modified_base 7: mod_base = OTHER; note = 2'-deoxy-2'-fluoroguanosine-3'-phosphate
  modified_base 8: mod_base = OTHER; note = 2'-O-methyladenosine-3'-phosphate
  modified_base 9: mod_base = OTHER; note = 2'-deoxy-2'-fluorouridine-3'-phosphate
  modified_base 10: mod_base = OTHER; note = 2'-deoxy-2'-fluoroguanosine-3'-phosphate
  modified_base 11: mod_base = OTHER; note = 2'-deoxy-2'-fluorouridine-3'-phosphate
  modified_base 12: mod_base = OTHER; note = 2'-O-methyluridine-3'-phosphate
  modified_base 13: mod_base = OTHER; note = 2'-O-methylguanosine-3'-phosphate
  modified_base 14: mod_base = OTHER; note = 2'-O-methyladenosine-3'-phosphate
  modified_base 15: mod_base = OTHER; note = 2'-O-methylguanosine-3'-phosphate
  modified_base 16: mod_base = OTHER; note = 2'-O-methylcytidine-3'-phosphate
  modified_base 17: mod_base = OTHER; note = 2'-O-methyladenosine-3'-phosphate
  modified_base 18: mod_base = OTHER; note = 2'-O-methylcytidine-3'-phosphate
  modified_base 19: mod_base = OTHER; note = 2'-O-methylcytidine-3'-phosphorothioate
  modified_base 20: mod_base = OTHER; note = 2'-O-methyluridine-3'-phosphorothioate
  modified_base 21: mod_base = OTHER; note = 2'-O-methyladenosine
acctctgatgttgagcaccta

SEQ ID NO: 393 - RNA, 21 nt, synthetic construct
  source 1..21: mol_type = other RNA
  modified_base 1: mod_base = OTHER; note = 2'-O-methyluridine-3'-phosphorothioate
  modified_base 2: mod_base = OTHER; note = 2'-O-methylguanosine-3'-phosphorothioate
  modified_base 3: mod_base = OTHER; note = 2'-O-methyladenosine-3'-phosphate
  modified_base 4: mod_base = OTHER; note = 2'-O-methyladenosine-3'-phosphate
  modified_base 5: mod_base = OTHER; note = 2'-O-methyluridine-3'-phosphate
  modified_base 6: mod_base = OTHER; note = 2'-O-hexadecyl-adenosine-3'-phosphate
  modified_base 7: mod_base = OTHER; note = 2'-deoxy-2'-fluorocytidine-3'-phosphate
  modified_base 8: mod_base = OTHER; note = 2'-O-methyluridine-3'-phosphate
  modified_base 9: mod_base = OTHER; note = 2'-deoxy-2'-fluoroguanosine-3'-phosphate
  modified_base 10: mod_base = OTHER; note = 2'-deoxy-2'-fluoroadenosine-3'-phosphate
  modified_base 11: mod_base = OTHER; note = 2'-deoxy-2'-fluoroguanosine-3'-phosphate
  modified_base 12: mod_base = OTHER; note = 2'-O-methylcytidine-3'-phosphate
  modified_base 13: mod_base = OTHER; note = 2'-O-methyladenosine-3'-phosphate
  modified_base 14: mod_base = OTHER; note = 2'-O-methylcytidine-3'-phosphate
  modified_base 15: mod_base = OTHER; note = 2'-O-methyluridine-3'-phosphate
  modified_base 16: mod_base = OTHER; note = 2'-O-methylguanosine-3'-phosphate
  modified_base 17: mod_base = OTHER; note = 2'-O-methyladenosine-3'-phosphate
  modified_base 18: mod_base = OTHER; note = 2'-O-methyladenosine-3'-phosphate
  modified_base 19: mod_base = OTHER; note = 2'-O-methyluridine-3'-phosphorothioate
  modified_base 20: mod_base = OTHER; note = 2'-O-methylguanosine-3'-phosphorothioate
  modified_base 21: mod_base = OTHER; note = 2'-O-methyladenosine
tgaatactgagcactgaatga

SEQ ID NO: 394 - RNA, 21 nt, synthetic construct
  source 1..21: mol_type = other RNA
  modified_base 1: mod_base = OTHER; note = 2'-O-methylcytidine-3'-phosphorothioate
  modified_base 2: mod_base = OTHER; note = 2'-O-methyladenosine-3'-phosphorothioate
  modified_base 3: mod_base = OTHER; note = 2'-O-methylguanosine-3'-phosphate
  modified_base 4: mod_base = OTHER; note = 2'-O-methylguanosine-3'-phosphate
  modified_base 5: mod_base = OTHER; note = 2'-O-methylguanosine-3'-phosphate
  modified_base 6: mod_base = OTHER; note = 2'-O-hexadecyl-adenosine-3'-phosphate
  modified_base 7: mod_base = OTHER; note = 2'-deoxy-2'-fluorouridine-3'-phosphate
  modified_base 8: mod_base = OTHER; note = 2'-O-methyladenosine-3'-phosphate
  modified_base 9: mod_base = OTHER; note = 2'-deoxy-2'-fluorouridine-3'-phosphate
  modified_base 10: mod_base = OTHER; note = 2'-deoxy-2'-fluoroguanosine-3'-phosphate
  modified_base 11: mod_base = OTHER; note = 2'-deoxy-2'-fluorocytidine-3'-phosphate
  modified_base 12: mod_base = OTHER; note = 2'-O-methylcytidine-3'-phosphate
  modified_base 13: mod_base = OTHER; note = 2'-O-methyluridine-3'-phosphate
  modified_base 14: mod_base = OTHER; note = 2'-O-methyladenosine-3'-phosphate
  modified_base 15: mod_base = OTHER; note = 2'-O-methylcytidine-3'-phosphate
  modified_base 16: mod_base = OTHER; note = 2'-O-methylcytidine-3'-phosphate
  modified_base 17: mod_base = OTHER; note = 2'-O-methyladenosine-3'-phosphate
  modified_base 18: mod_base = OTHER; note = 2'-O-methyladenosine-3'-phosphate
  modified_base 19: mod_base = OTHER; note = 2'-O-methyluridine-3'-phosphorothioate
  modified_base 20: mod_base = OTHER; note = 2'-O-methyladenosine-3'-phosphorothioate
  modified_base 21: mod_base = OTHER; note = 2'-O-methyladenosine
cagggatatgcctaccaataa

SEQ ID NO: 395 - RNA, 21 nt, synthetic construct
  source 1..21: mol_type = other RNA
  modified_base 1: mod_base = OTHER; note = 2'-O-methyladenosine-3'-phosphorothioate
  modified_base 2: mod_base = OTHER; note = 2'-O-methylguanosine-3'-phosphorothioate
  modified_base 3: mod_base = OTHER; note = 2'-O-methylguanosine-3'-phosphate
  modified_base 4: mod_base = OTHER; note = 2'-O-methylcytidine-3'-phosphate
  modified_base 5: mod_base = OTHER; note = 2'-O-methyladenosine-3'-phosphate
  modified_base 6: mod_base = OTHER; note = 2'-O-hexadecyl-uridine-3'-phosphate
  modified_base 7: mod_base = OTHER; note = 2'-deoxy-2'-fluoroguanosine-3'-phosphate
  modified_base 8: mod_base = OTHER; note = 2'-O-methyluridine-3'-phosphate
  modified_base 9: mod_base = OTHER; note = 2'-deoxy-2'-fluoroadenosine-3'-phosphate
  modified_base 10: mod_base = OTHER; note = 2'-deoxy-2'-fluorocytidine-3'-phosphate
  modified_base 11: mod_base = OTHER; note = 2'-deoxy-2'-fluorocytidine-3'-phosphate
  modified_base 12: mod_base = OTHER; note = 2'-O-methylcytidine-3'-phosphate
  modified_base 13: mod_base = OTHER; note = 2'-O-methyladenosine-3'-phosphate
  modified_base 14: mod_base = OTHER; note = 2'-O-methyladenosine-3'-phosphate
  modified_base 15: mod_base = OTHER; note = 2'-O-methyladenosine-3'-phosphate
  modified_base 16: mod_base = OTHER; note = 2'-O-methylcytidine-3'-phosphate
  modified_base 17: mod_base = OTHER; note = 2'-O-methyladenosine-3'-phosphate
  modified_base 18: mod_base = OTHER; note = 2'-O-methyluridine-3'-phosphate
  modified_base 19: mod_base = OTHER; note = 2'-O-methyladenosine-3'-phosphorothioate
  modified_base 20: mod_base = OTHER; note = 2'-O-methyladenosine-3'-phosphorothioate
  modified_base 21: mod_base = OTHER; note = 2'-O-methyladenosine
aggcatgtacccaaacataaa

SEQ ID NO: 396 - RNA, 21 nt, synthetic construct
  source 1..21: mol_type = other RNA
  modified_base 1: mod_base = OTHER; note = 2'-O-methyladenosine-3'-phosphorothioate
  modified_base 2: mod_base = OTHER; note = 2'-O-methylcytidine-3'-phosphorothioate
  modified_base 3: mod_base = OTHER; note = 2'-O-methylguanosine-3'-phosphate
  modified_base 4: mod_base = OTHER; note = 2'-O-methylguanosine-3'-phosphate
  modified_base 5: mod_base = OTHER; note = 2'-O-methyladenosine-3'-phosphate
  modified_base 6: mod_base = OTHER; note = 2'-O-hexadecyl-uridine-3'-phosphate
  modified_base 7: mod_base = OTHER; note = 2'-deoxy-2'-fluoroguanosine-3'-phosphate
  modified_base 8: mod_base = OTHER; note = 2'-O-methyluridine-3'-phosphate
  modified_base 9: mod_base = OTHER; note = 2'-deoxy-2'-fluoroadenosine-3'-phosphate
  modified_base 10: mod_base = OTHER; note = 2'-deoxy-2'-fluoroadenosine-3'-phosphate
  modified_base 11: mod_base = OTHER; note = 2'-deoxy-2'-fluoroguanosine-3'-phosphate
  modified_base 12: mod_base = OTHER; note = 2'-O-methylguanosine-3'-phosphate
  modified_base 13: mod_base = OTHER; note = 2'-O-methylcytidine-3'-phosphate
  modified_base 14: mod_base = OTHER; note = 2'-O-methyladenosine-3'-phosphate
  modified_base 15: mod_base = OTHER; note = 2'-O-methylguanosine-3'-phosphate
  modified_base 16: mod_base = OTHER; note = 2'-O-methyladenosine-3'-phosphate
  modified_base 17: mod_base = OTHER; note = 2'-O-methyladenosine-3'-phosphate
  modified_base 18: mod_base = OTHER; note = 2'-O-methyladenosine-3'-phosphate
  modified_base 19: mod_base = OTHER; note = 2'-O-methylguanosine-3'-phosphorothioate
  modified_base 20: mod_base = OTHER; note = 2'-O-methyluridine-3'-phosphorothioate
  modified_base 21: mod_base = OTHER; note = 2'-O-methyladenosine
acggatgtaaggcagaaagta

SEQ ID NO: 397 - RNA, 21 nt, synthetic construct
  source 1..21: mol_type = other RNA
  modified_base 1: mod_base = OTHER; note = 2'-O-methyladenosine-3'-phosphorothioate
  modified_base 2: mod_base = OTHER; note = 2'-O-methyluridine-3'-phosphorothioate
  modified_base 3: mod_base = OTHER; note = 2'-O-methylcytidine-3'-phosphate
  modified_base 4: mod_base = OTHER; note = 2'-O-methylguanosine-3'-phosphate
  modified_base 5: mod_base = OTHER; note = 2'-O-methylguanosine-3'-phosphate
  modified_base 6: mod_base = OTHER; note = 2'-O-hexadecyl-adenosine-3'-phosphate
  modified_base 7: mod_base = OTHER; note = 2'-deoxy-2'-fluoroguanosine-3'-phosphate
  modified_base 8: mod_base = OTHER; note = 2'-O-methyladenosine-3'-phosphate
  modified_base 9: mod_base = OTHER; note = 2'-deoxy-2'-fluoroadenosine-3'-phosphate
  modified_base 10: mod_base = OTHER; note = 2'-deoxy-2'-fluoroguanosine-3'-phosphate
  modified_base 11: mod_base = OTHER; note = 2'-deoxy-2'-fluoroguanosine-3'-phosphate
  modified_base 12: mod_base = OTHER; note = 2'-O-methyladenosine-3'-phosphate
  modified_base 13: mod_base = OTHER; note = 2'-O-methyladenosine-3'-phosphate
  modified_base 14: mod_base = OTHER; note = 2'-O-methyluridine-3'-phosphate
  modified_base 15: mod_base = OTHER; note = 2'-O-methylguanosine-3'-phosphate
  modified_base 16: mod_base = OTHER; note = 2'-O-methyladenosine-3'-phosphate
  modified_base 17: mod_base = OTHER; note = 2'-O-methylguanosine-3'-phosphate
  modified_base 18: mod_base = OTHER; note = 2'-O-methyladenosine-3'-phosphate
  modified_base 19: mod_base = OTHER; note = 2'-O-methyladenosine-3'-phosphorothioate
  modified_base 20: mod_base = OTHER; note = 2'-O-methyladenosine-3'-phosphorothioate
  modified_base 21: mod_base = OTHER; note = 2'-O-methyladenosine
atcggagaaggaatgagaaaa

SEQ ID NO: 398 - RNA, 21 nt, synthetic construct
  source 1..21: mol_type = other RNA
  modified_base 1: mod_base = OTHER; note = 2'-O-methylguanosine-3'-phosphorothioate
  modified_base 2: mod_base = OTHER; note = 2'-O-methyluridine-3'-phosphorothioate
  modified_base 3: mod_base = OTHER; note = 2'-O-methylguanosine-3'-phosphate
  modified_base 4: mod_base = OTHER; note = 2'-O-methyladenosine-3'-phosphate
  modified_base 5: mod_base = OTHER; note = 2'-O-methyluridine-3'-phosphate
  modified_base 6: mod_base = OTHER; note = 2'-O-hexadecyl-guanosine-3'-phosphate
  modified_base 7: mod_base = OTHER; note = 2'-deoxy-2'-fluorouridine-3'-phosphate
  modified_base 8: mod_base = OTHER; note = 2'-O-methyluridine-3'-phosphate
  modified_base 9: mod_base = OTHER; note = 2'-deoxy-2'-fluoroadenosine-3'-phosphate
  modified_base 10: mod_base = OTHER; note = 2'-deoxy-2'-fluoroadenosine-3'-phosphate
  modified_base 11: mod_base = OTHER; note = 2'-deoxy-2'-fluorouridine-3'-phosphate
  modified_base 12: mod_base = OTHER; note = 2'-O-methylguanosine-3'-phosphate
  modified_base 13: mod_base = OTHER; note = 2'-O-methyladenosine-3'-phosphate
  modified_base 14: mod_base = OTHER; note = 2'-O-methyladenosine-3'-phosphate
  modified_base 15: mod_base = OTHER; note = 2'-O-methyladenosine-3'-phosphate
  modified_base 16: mod_base = OTHER; note = 2'-O-methyladenosine-3'-phosphate
  modified_base 17: mod_base = OTHER; note = 2'-O-methylguanosine-3'-phosphate
  modified_base 18: mod_base = OTHER; note = 2'-O-methyluridine-3'-phosphate
  modified_base 19: mod_base = OTHER; note = 2'-O-methylcytidine-3'-phosphorothioate
  modified_base 20: mod_base = OTHER; note = 2'-O-methyladenosine-3'-phosphorothioate
  modified_base 21: mod_base = OTHER; note = 2'-O-methyladenosine
gtgatgttaatgaaaagtcaa

SEQ ID NO: 399 - RNA, 21 nt, synthetic construct
  source 1..21: mol_type = other RNA
  modified_base 1: mod_base = OTHER; note = 2'-O-methyladenosine-3'-phosphorothioate
  modified_base 2: mod_base = OTHER; note = 2'-O-methylguanosine-3'-phosphorothioate
  modified_base 3: mod_base = OTHER; note = 2'-O-methyluridine-3'-phosphate
  modified_base 4: mod_base = OTHER; note = 2'-O-methylcytidine-3'-phosphate
  modified_base 5: mod_base = OTHER; note = 2'-O-methyladenosine-3'-phosphate
  modified_base 6: mod_base = OTHER; note = 2'-O-hexadecyl-uridine-3'-phosphate
  modified_base 7: mod_base = OTHER; note = 2'-deoxy-2'-fluoroadenosine-3'-phosphate
  modified_base 8: mod_base = OTHER; note = 2'-O-methyluridine-3'-phosphate
  modified_base 9: mod_base = OTHER; note = 2'-deoxy-2'-fluoroguanosine-3'-phosphate
  modified_base 10: mod_base = OTHER; note = 2'-deoxy-2'-fluorocytidine-3'-phosphate
  modified_base 11: mod_base = OTHER; note = 2'-deoxy-2'-fluoroadenosine-3'-phosphate
  modified_base 12: mod_base = OTHER; note = 2'-O-methylguanosine-3'-phosphate
  modified_base 13: mod_base = OTHER; note = 2'-O-methylcytidine-3'-phosphate
  modified_base 14: mod_base = OTHER; note = 2'-O-methyluridine-3'-phosphate
  modified_base 15: mod_base = OTHER; note = 2'-O-methyladenosine-3'-phosphate
  modified_base 16: mod_base = OTHER; note = 2'-O-methylguanosine-3'-phosphate
  modified_base 17: mod_base = OTHER; note = 2'-O-methyladenosine-3'-phosphate
  modified_base 18: mod_base = OTHER; note = 2'-O-methylguanosine-3'-phosphate
  modified_base 19: mod_base = OTHER; note = 2'-O-methylcytidine-3'-phosphorothioate
  modified_base 20: mod_base = OTHER; note = 2'-O-methyladenosine-3'-phosphorothioate
  modified_base 21: mod_base = OTHER; note = 2'-O-methyladenosine
agtcatatgcagctagagcaa

SEQ ID NO: 400 - RNA, 21 nt, synthetic construct
  source 1..21: mol_type = other RNA
  modified_base 1: mod_base = OTHER; note = 2'-O-methylcytidine-3'-phosphorothioate
  modified_base 2: mod_base = OTHER; note = 2'-O-methyluridine-3'-phosphorothioate
  modified_base 3: mod_base = OTHER; note = 2'-O-methyluridine-3'-phosphate
  modified_base 4: mod_base = OTHER; note = 2'-O-methyluridine-3'-phosphate
  modified_base 5: mod_base = OTHER; note = 2'-O-methylcytidine-3'-phosphate
  modified_base 6: mod_base = OTHER; note = 2'-O-hexadecyl-uridine-3'-phosphate
  modified_base 7: mod_base = OTHER; note = 2'-deoxy-2'-fluoroguanosine-3'-phosphate
  modified_base 8: mod_base = OTHER; note = 2'-O-methylguanosine-3'-phosphate
  modified_base 9: mod_base = OTHER; note = 2'-deoxy-2'-fluoroadenosine-3'-phosphate
  modified_base 10: mod_base = OTHER; note = 2'-deoxy-2'-fluoroadenosine-3'-phosphate
  modified_base 11: mod_base = OTHER; note = 2'-deoxy-2'-fluoroguanosine-3'-phosphate
  modified_base 12: mod_base = OTHER; note = 2'-O-methyladenosine-3'-phosphate
  modified_base 13: mod_base = OTHER; note = 2'-O-methylguanosine-3'-phosphate
  modified_base 14: mod_base = OTHER; note = 2'-O-methyladenosine-3'-phosphate
  modified_base 15: mod_base = OTHER; note = 2'-O-methyluridine-3'-phosphate
  modified_base 16: mod_base = OTHER; note = 2'-O-methyluridine-3'-phosphate
  modified_base 17: mod_base = OTHER; note = 2'-O-methylguanosine-3'-phosphate
  modified_base 18: mod_base = OTHER; note = 2'-O-methylcytidine-3'-phosphate
  modified_base 19: mod_base = OTHER; note = 2'-O-methyladenosine-3'-phosphorothioate
  modified_base 20: mod_base = OTHER; note = 2'-O-methyluridine-3'-phosphorothioate
  modified_base 21: mod_base = OTHER; note = 2'-O-methyladenosine
ctttctggaagagattgcata

SEQ ID NO: 401 - RNA, 21 nt, synthetic construct
  source 1..21: mol_type = other RNA
  modified_base 1: mod_base = OTHER; note = 2'-O-methyladenosine-3'-phosphorothioate
  modified_base 2: mod_base = OTHER; note = 2'-O-methyluridine-3'-phosphorothioate
  modified_base 3: mod_base = OTHER; note = 2'-O-methyluridine-3'-phosphate
  modified_base 4: mod_base = OTHER; note = 2'-O-methylcytidine-3'-phosphate
  modified_base 5: mod_base = OTHER; note = 2'-O-methyladenosine-3'-phosphate
  modified_base 6: mod_base = OTHER; note = 2'-O-hexadecyl-guanosine-3'-phosphate
  modified_base 7: mod_base = OTHER; note = 2'-deoxy-2'-fluoroguanosine-3'-phosphate
  modified_base 8: mod_base = OTHER; note = 2'-O-methyladenosine-3'-phosphate
  modified_base 9: mod_base = OTHER; note = 2'-deoxy-2'-fluoroadenosine-3'-phosphate
  modified_base 10: mod_base = OTHER; note = 2'-deoxy-2'-fluoroguanosine-3'-phosphate
  modified_base 11: mod_base = OTHER; note = 2'-deoxy-2'-fluoroguanosine-3'-phosphate
  modified_base 12: mod_base = OTHER; note = 2'-O-methyladenosine-3'-phosphate
  modified_base 13: mod_base = OTHER; note = 2'-O-methyluridine-3'-phosphate
  modified_base 14: mod_base = OTHER; note = 2'-O-methylcytidine-3'-phosphate
  modified_base 15: mod_base = OTHER; note = 2'-O-methyluridine-3'-phosphate
  modified_base 16: mod_base = OTHER; note = 2'-O-methyluridine-3'-phosphate
  modified_base 17: mod_base = OTHER; note = 2'-O-methyluridine-3'-phosphate
  modified_base 18: mod_base = OTHER; note = 2'-O-methylguanosine-3'-phosphate
  modified_base 19: mod_base = OTHER; note = 2'-O-methyluridine-3'-phosphorothioate
  modified_base 20: mod_base = OTHER; note = 2'-O-methyladenosine-3'-phosphorothioate
  modified_base 21: mod_base = OTHER; note = 2'-O-methyladenosine
attcaggaaggatctttgtaa

SEQ ID NO: 402 - RNA, 21 nt, synthetic construct
  source 1..21: mol_type = other RNA
  modified_base 1: mod_base = OTHER; note = 2'-O-methyladenosine-3'-phosphorothioate
  modified_base 2: mod_base = OTHER; note = 2'-O-methylguanosine-3'-phosphorothioate
  modified_base 3: mod_base = OTHER; note = 2'-O-methyladenosine-3'-phosphate
  modified_base 4: mod_base = OTHER; note = 2'-O-methylguanosine-3'-phosphate
  modified_base 5: mod_base = OTHER; note = 2'-O-methylguanosine-3'-phosphate
  modified_base 6: mod_base = OTHER; note = 2'-O-hexadecyl-guanosine-3'-phosphate
  modified_base 7: mod_base = OTHER; note = 2'-deoxy-2'-fluoroadenosine-3'-phosphate
  modified_base 8: mod_base = OTHER; note = 2'-O-methyladenosine-3'-phosphate
  modified_base 9: mod_base = OTHER; note = 2'-deoxy-2'-fluoroguanosine-3'-phosphate
  modified_base 10: mod_base = OTHER; note = 2'-deoxy-2'-fluorouridine-3'-phosphate
  modified_base 11: mod_base = OTHER; note = 2'-deoxy-2'-fluorocytidine-3'-phosphate
  modified_base 12: mod_base = OTHER; note = 2'-O-methyluridine-3'-phosphate
  modified_base 13: mod_base = OTHER; note = 2'-O-methylguanosine-3'-phosphate
  modified_base 14: mod_base = OTHER; note = 2'-O-methylcytidine-3'-phosphate
  modified_base 15: mod_base = OTHER; note = 2'-O-methyluridine-3'-phosphate
  modified_base 16: mod_base = OTHER; note = 2'-O-methylguanosine-3'-phosphate
  modified_base 17: mod_base = OTHER; note = 2'-O-methyluridine-3'-phosphate
  modified_base 18: mod_base = OTHER; note = 2'-O-methylguanosine-3'-phosphate
  modified_base 19: mod_base = OTHER; note = 2'-O-methyluridine-3'-phosphorothioate
  modified_base 20: mod_base = OTHER; note = 2'-O-methyluridine-3'-phosphorothioate
  modified_base 21: mod_base = OTHER; note = 2'-O-methyladenosine
agagggaagtctgctgtgtta

SEQ ID NO: 403 - RNA, 21 nt, synthetic construct
  source 1..21: mol_type = other RNA
  modified_base 1: mod_base = OTHER; note = 2'-O-methyluridine-3'-phosphorothioate
  modified_base 2: mod_base = OTHER; note = 2'-O-methylguanosine-3'-phosphorothioate
  modified_base 3: mod_base = OTHER; note = 2'-O-methyluridine-3'-phosphate
  modified_base 4: mod_base = OTHER; note = 2'-O-methyluridine-3'-phosphate
  modified_base 5: mod_base = OTHER; note = 2'-O-methylcytidine-3'-phosphate
  modified_base 6: mod_base = OTHER; note = 2'-O-hexadecyl-uridine-3'-phosphate
  modified_base 7: mod_base = OTHER; note = 2'-deoxy-2'-fluorocytidine-3'-phosphate
  modified_base 8: mod_base = OTHER; note = 2'-O-methyladenosine-3'-phosphate
  modified_base 9: mod_base = OTHER; note = 2'-deoxy-2'-fluorouridine-3'-phosphate
  modified_base 10: mod_base = OTHER; note = 2'-deoxy-2'-fluoroguanosine-3'-phosphate
  modified_base 11: mod_base = OTHER; note = 2'-deoxy-2'-fluorouridine-3'-phosphate
  modified_base 12: mod_base = OTHER; note = 2'-O-methyladenosine-3'-phosphate
  modified_base 13: mod_base = OTHER; note = 2'-O-methylguanosine-3'-phosphate
  modified_base 14: mod_base = OTHER; note = 2'-O-methylguanosine-3'-phosphate
  modified_base 15: mod_base = OTHER; note = 2'-O-methyladenosine-3'-phosphate
  modified_base 16: mod_base = OTHER; note = 2'-O-methyluridine-3'-phosphate
  modified_base 17: mod_base = OTHER; note = 2'-O-methylguanosine-3'-phosphate
  modified_base 18: mod_base = OTHER; note = 2'-O-methyluridine-3'-phosphate
  modified_base 19: mod_base = OTHER; note = 2'-O-methylcytidine-3'-phosphorothioate
  modified_base 20: mod_base = OTHER; note = 2'-O-methyladenosine-3'-phosphorothioate
  modified_base 21: mod_base = OTHER; note = 2'-O-methyladenosine
tgttctcatgtaggatgtcaa

SEQ ID NO: 404 - RNA, 21 nt, synthetic construct
  source 1..21: mol_type = other RNA
  modified_base 1: mod_base = OTHER; note = 2'-O-methyluridine-3'-phosphorothioate
  modified_base 2: mod_base = OTHER; note = 2'-O-methylcytidine-3'-phosphorothioate
  modified_base 3: mod_base = OTHER; note = 2'-O-methyluridine-3'-phosphate
  modified_base 4: mod_base = OTHER; note = 2'-O-methylcytidine-3'-phosphate
  modified_base 5: mod_base = OTHER; note = 2'-O-methyluridine-3'-phosphate
  modified_base 6: mod_base = OTHER; note = 2'-O-hexadecyl-uridine-3'-phosphate
  modified_base 7: mod_base = OTHER; note = 2'-deoxy-2'-fluorouridine-3'-phosphate
  modified_base 8: mod_base = OTHER; note = 2'-O-methyluridine-3'-phosphate
  modified_base 9: mod_base = OTHER; note = 2'-deoxy-2'-fluorouridine-3'-phosphate
  modified_base 10: mod_base = OTHER; note = 2'-deoxy-2'-fluoroguanosine-3'-phosphate
  modified_base 11: mod_base = OTHER; note = 2'-deoxy-2'-fluoroguanosine-3'-phosphate
  modified_base 12: mod_base = OTHER; note = 2'-O-methylcytidine-3'-phosphate
  modified_base 13: mod_base = OTHER; note = 2'-O-methylcytidine-3'-phosphate
  modified_base 14: mod_base = OTHER; note = 2'-O-methyladenosine-3'-phosphate
  modified_base 15: mod_base = OTHER; note = 2'-O-methyladenosine-3'-phosphate
  modified_base 16: mod_base = OTHER; note = 2'-O-methyluridine-3'-phosphate
  modified_base 17: mod_base = OTHER; note = 2'-O-methylguanosine-3'-phosphate
  modified_base 18: mod_base = OTHER; note = 2'-O-methyluridine-3'-phosphate
  modified_base 19: mod_base = OTHER; note = 2'-O-methylcytidine-3'-phosphorothioate
  modified_base 20: mod_base = OTHER; note = 2'-O-methyluridine-3'-phosphorothioate
  modified_base 21: mod_base = OTHER; note = 2'-O-methyladenosine
tctctttttggccaatgtcta

SEQ ID NO: 405 - RNA, 21 nt, synthetic construct
  source 1..21: mol_type = other RNA
  modified_base 1: mod_base = OTHER; note = 2'-O-methyluridine-3'-phosphorothioate
  modified_base 2: mod_base = OTHER; note = 2'-O-methylguanosine-3'-phosphorothioate
  modified_base 3: mod_base = OTHER; note = 2'-O-methyluridine-3'-phosphate
  modified_base 4: mod_base = OTHER; note = 2'-O-methylcytidine-3'-phosphate
  modified_base 5: mod_base = OTHER; note = 2'-O-methyluridine-3'-phosphate
  modified_base 6: mod_base = OTHER; note = 2'-O-hexadecyl-uridine-3'-phosphate
  modified_base 7: mod_base = OTHER; note = 2'-deoxy-2'-fluorouridine-3'-phosphate
  modified_base 8: mod_base = OTHER; note = 2'-O-methyluridine-3'-phosphate
  modified_base 9: mod_base = OTHER; note = 2'-deoxy-2'-fluorocytidine-3'-phosphate
  modified_base 10: mod_base = OTHER; note = 2'-deoxy-2'-fluoroadenosine-3'-phosphate
  modified_base 11: mod_base = OTHER; note = 2'-deoxy-2'-fluorocytidine-3'-phosphate
  modified_base 12: mod_base = OTHER; note = 2'-O-methyluridine-3'-phosphate
  modified_base 13: mod_base = OTHER; note = 2'-O-methyluridine-3'-phosphate
  modified_base 14: mod_base = OTHER; note = 2'-O-methyluridine-3'-phosphate
  modified_base 15: mod_base = OTHER; note = 2'-O-methylcytidine-3'-phosphate
  modified_base 16: mod_base = OTHER; note = 2'-O-methylcytidine-3'-phosphate
  modified_base 17: mod_base = OTHER; note = 2'-O-methyluridine-3'-phosphate
  modified_base 18: mod_base = OTHER; note = 2'-O-methylguanosine-3'-phosphate
  modified_base 19: mod_base = OTHER; note = 2'-O-methyladenosine-3'-phosphorothioate
  modified_base 20: mod_base = OTHER; note = 2'-O-methylcytidine-3'-phosphorothioate
  modified_base 21: mod_base = OTHER; note = 2'-O-methyladenosine
tgtcttttcactttcctgaca

SEQ ID NO: 406 - RNA, 21 nt, synthetic construct
  source 1..21: mol_type = other RNA
  modified_base 1: mod_base = OTHER; note = 2'-O-methylcytidine-3'-phosphorothioate
  modified_base 2: mod_base = OTHER; note = 2'-O-methyluridine-3'-phosphorothioate
  modified_base 3: mod_base = OTHER; note = 2'-O-methylguanosine-3'-phosphate
  modified_base 4: mod_base = OTHER; note = 2'-O-methyladenosine-3'-phosphate
  modified_base 5: mod_base = OTHER; note = 2'-O-methylcytidine-3'-phosphate
  modified_base 6: mod_base = OTHER; note = 2'-O-hexadecyl-cytidine-3'-phosphate
  modified_base 7: mod_base = OTHER; note = 2'-deoxy-2'-fluorocytidine-3'-phosphate
  modified_base 8: mod_base = OTHER; note = 2'-O-methyluridine-3'-phosphate
  modified_base 9: mod_base = OTHER; note = 2'-deoxy-2'-fluorouridine-3'-phosphate
  modified_base 10: mod_base = OTHER; note = 2'-deoxy-2'-fluorouridine-3'-phosphate
  modified_base 11: mod_base = OTHER; note = 2'-deoxy-2'-fluoroadenosine-3'-phosphate
  modified_base 12: mod_base = OTHER; note = 2'-O-methylguanosine-3'-phosphate
  modified_base 13: mod_base = OTHER; note = 2'-O-methyladenosine-3'-phosphate
  modified_base 14: mod_base = OTHER; note = 2'-O-methyladenosine-3'-phosphate
  modified_base 15: mod_base = OTHER; note = 2'-O-methyluridine-3'-phosphate
  modified_base 16: mod_base = OTHER; note = 2'-O-methylcytidine-3'-phosphate
  modified_base 17: mod_base = OTHER; note = 2'-O-methyladenosine-3'-phosphate
  modified_base 18: mod_base = OTHER; note = 2'-O-methyluridine-3'-phosphate
  modified_base 19: mod_base = OTHER; note = 2'-O-methylcytidine-3'-phosphorothioate
  modified_base 20: mod_base = OTHER; note = 2'-O-methylcytidine-3'-phosphorothioate
  modified_base 21: mod_base = OTHER; note = 2'-O-methyladenosine
ctgaccctttagaatcatcca

SEQ ID NO: 407 - RNA, 21 nt, synthetic construct
  source 1..21: mol_type = other RNA
  modified_base 1: mod_base = OTHER; note = 2'-O-methylguanosine-3'-phosphorothioate
  modified_base 2: mod_base = OTHER; note = 2'-O-methylcytidine-3'-phosphorothioate
  modified_base 3: mod_base = OTHER; note = 2'-O-methyladenosine-3'-phosphate
  modified_base 4: mod_base = OTHER; note = 2'-O-methyladenosine-3'-phosphate
  modified_base 5: mod_base = OTHER; note = 2'-O-methyluridine-3'-phosphate
  modified_base 6: mod_base = OTHER; note = 2'-O-hexadecyl-cytidine-3'-phosphate
  modified_base 7: mod_base = OTHER; note = 2'-deoxy-2'-fluoroadenosine-3'-phosphate
  modified_base 8: mod_base = OTHER; note = 2'-O-methyluridine-3'-phosphate
  modified_base 9: mod_base = OTHER; note = 2'-deoxy-2'-fluoroguanosine-3'-phosphate
  modified_base 10: mod_base = OTHER; note = 2'-deoxy-2'-fluoroguanosine-3'-phosphate
  modified_base 11: mod_base = OTHER; note = 2'-deoxy-2'-fluoroadenosine-3'-phosphate
  modified_base 12: mod_base = OTHER; note = 2'-O-methyladenosine-3'-phosphate
  modified_base 13: mod_base = OTHER; note = 2'-O-methylguanosine-3'-phosphate
  modified_base 14: mod_base = OTHER; note = 2'-O-methyluridine-3'-phosphate
  modified_base 15: mod_base = OTHER; note = 2'-O-methyluridine-3'-phosphate
  modified_base 16: mod_base = OTHER; note = 2'-O-methylguanosine-3'-phosphate
  modified_base 17: mod_base = OTHER; note = 2'-O-methylcytidine-3'-phosphate
  modified_base 18: mod_base = OTHER; note = 2'-O-methylcytidine-3'-phosphate
  modified_base 19: mod_base = OTHER; note = 2'-O-methyluridine-3'-phosphorothioate
  modified_base 20: mod_base = OTHER; note = 2'-O-methyluridine-3'-phosphorothioate
  modified_base 21: mod_base = OTHER; note = 2'-O-methyladenosine
gcaatcatggaagttgcctta

SEQ ID NO: 408 - RNA, 21 nt, synthetic construct
  source 1..21: mol_type = other RNA
  modified_base 1: mod_base = OTHER; note = 2'-O-methyluridine-3'-phosphorothioate
  modified_base 2: mod_base = OTHER; note = 2'-O-methyluridine-3'-phosphorothioate
  modified_base 3: mod_base = OTHER; note = 2'-O-methyladenosine-3'-phosphate
  modified_base 4: mod_base = OTHER; note = 2'-O-methyluridine-3'-phosphate
  modified_base 5: mod_base = OTHER; note = 2'-O-methyluridine-3'-phosphate
  modified_base 6: mod_base = OTHER; note = 2'-O-hexadecyl-guanosine-3'-phosphate
  modified_base 7: mod_base = OTHER; note = 2'-deoxy-2'-fluorouridine-3'-phosphate
  modified_base 8: mod_base = OTHER; note = 2'-O-methylcytidine-3'-phosphate
  modified_base 9: mod_base = OTHER; note = 2'-deoxy-2'-fluoroadenosine-3'-phosphate
  modified_base 10: mod_base = OTHER; note = 2'-deoxy-2'-fluorocytidine-3'-phosphate
  modified_base 11: mod_base = OTHER; note = 2'-deoxy-2'-fluorouridine-3'-phosphate
  modified_base 12: mod_base = OTHER; note = 2'-O-methylguanosine-3'-phosphate
  modified_base 13: mod_base = OTHER; note = 2'-O-methylguanosine-3'-phosphate
  modified_base 14: mod_base = OTHER; note = 2'-O-methyluridine-3'-phosphate
  modified_base 15: mod_base = OTHER; note = 2'-O-methyluridine-3'-phosphate
  modified_base 16: mod_base = OTHER; note = 2'-O-methyladenosine-3'-phosphate
  modified_base 17: mod_base = OTHER; note = 2'-O-methyladenosine-3'-phosphate
  modified_base 18: mod_base = OTHER; note = 2'-O-methylguanosine-3'-phosphate
  modified_base 19: mod_base = OTHER; note = 2'-O-methyladenosine-3'-phosphorothioate
  modified_base 20: mod_base = OTHER; note = 2'-O-methyladenosine-3'-phosphorothioate
  modified_base 21: mod_base = OTHER; note = 2'-O-methyladenosine
ttattgtcactggttaagaaa

SEQ ID NO: 409 - RNA, 21 nt, synthetic construct
  source 1..21: mol_type = other RNA
  modified_base 1: mod_base = OTHER; note = 2'-O-methyladenosine-3'-phosphorothioate
  modified_base 2: mod_base = OTHER; note = 2'-O-methyladenosine-3'-phosphorothioate
  modified_base 3: mod_base = OTHER; note = 2'-O-methylguanosine-3'-phosphate
  modified_base 4: mod_base = OTHER; note = 2'-O-methyladenosine-3'-phosphate
  modified_base 5: mod_base = OTHER; note = 2'-O-methyladenosine-3'-phosphate
  modified_base 6: mod_base = OTHER; note = 2'-O-hexadecyl-cytidine-3'-phosphate
  modified_base 7: mod_base = OTHER; note = 2'-deoxy-2'-fluorouridine-3'-phosphate
  modified_base 8: mod_base = OTHER; note = 2'-O-methyluridine-3'-phosphate
  modified_base 9: mod_base = OTHER; note = 2'-deoxy-2'-fluoroguanosine-3'-phosphate
  modified_base 10: mod_base = OTHER; note = 2'-deoxy-2'-fluoroguanosine-3'-phosphate
  modified_base 11: mod_base = OTHER; note = 2'-deoxy-2'-fluorocytidine-3'-phosphate
  modified_base 12: mod_base = OTHER; note = 2'-O-methylguanosine-3'-phosphate
  modified_base 13: mod_base = OTHER; note = 2'-O-methyladenosine-3'-phosphate
  modified_base 14: mod_base = OTHER; note = 2'-O-methylguanosine-3'-phosphate
  modified_base 15: mod_base = OTHER; note = 2'-O-methyladenosine-3'-phosphate
  modified_base 16: mod_base = OTHER; note = 2'-O-methyluridine-3'-phosphate
  modified_base 17: mod_base = OTHER; note = 2'-O-methyluridine-3'-phosphate
  modified_base 18: mod_base = OTHER; note = 2'-O-methylguanosine-3'-phosphate
  modified_base 19: mod_base = OTHER; note = 2'-O-methyladenosine-3'-phosphorothioate
  modified_base 20: mod_base = OTHER; note = 2'-O-methyladenosine-3'-phosphorothioate
  modified_base 21: mod_base = OTHER; note = 2'-O-methyladenosine
aagaacttggcgagattgaaa

SEQ ID NO: 410 - RNA, 21 nt, synthetic construct
  source 1..21: mol_type = other RNA
  modified_base 1: mod_base = OTHER; note = 2'-O-methyladenosine-3'-phosphorothioate
  modified_base 2: mod_base = OTHER; note = 2'-O-methyladenosine-3'-phosphorothioate
  modified_base 3: mod_base = OTHER; note = 2'-O-methylguanosine-3'-phosphate
  modified_base 4: mod_base = OTHER; note = 2'-O-methylguanosine-3'-phosphate
  modified_base 5: mod_base = OTHER; note = 2'-O-methylguanosine-3'-phosphate
  modified_base 6: mod_base = OTHER; note = 2'-O-hexadecyl-cytidine-3'-phosphate
  modified_base 7: mod_base = OTHER; note = 2'-deoxy-2'-fluorouridine-3'-phosphate
  modified_base 8: mod_base = OTHER; note = 2'-O-methyluridine-3'-phosphate
  modified_base 9: mod_base = OTHER; note = 2'-deoxy-2'-fluorouridine-3'-phosphate
  modified_base 10: mod_base = OTHER; note = 2'-deoxy-2'-fluorouridine-3'-phosphate
  modified_base 11: mod_base = OTHER; note = 2'-deoxy-2'-fluoroguanosine-3'-phosphate
  modified_base 12: mod_base = OTHER; note = 2'-O-methyluridine-3'-phosphate
  modified_base 13: mod_base = OTHER; note = 2'-O-methyluridine-3'-phosphate
  modified_base 14: mod_base = OTHER; note = 2'-O-methyladenosine-3'-phosphate
  modified_base 15: mod_base = OTHER; note = 2'-O-methyluridine-3'-phosphate
  modified_base 16: mod_base = OTHER; note = 2'-O-methyluridine-3'-phosphate
  modified_base 17: mod_base = OTHER; note = 2'-O-methylguanosine-3'-phosphate
  modified_base 18: mod_base = OTHER; note = 2'-O-methyluridine-3'-phosphate
  modified_base 19: mod_base = OTHER; note = 2'-O-methyluridine-3'-phosphorothioate
  modified_base 20: mod_base = OTHER; note = 2'-O-methylguanosine-3'-phosphorothioate
  modified_base 21: mod_base = OTHER; note = 2'-O-methyladenosine
aagggcttttgttattgttga

SEQ ID NO: 411 - RNA, 21 nt, synthetic construct
  source 1..21: mol_type = other RNA
  modified_base 1: mod_base = OTHER; note = 2'-O-methyluridine-3'-phosphorothioate
  modified_base 2: mod_base = OTHER; note = 2'-O-methyluridine-3'-phosphorothioate
  modified_base 3: mod_base = OTHER; note = 2'-O-methylguanosine-3'-phosphate
  modified_base 4: mod_base = OTHER; note = 2'-O-methyluridine-3'-phosphate
  modified_base 5: mod_base = OTHER; note = 2'-O-methyluridine-3'-phosphate
  modified_base 6: mod_base = OTHER; note = 2'-O-hexadecyl-guanosine-3'-phosphate
  modified_base 7: mod_base = OTHER; note = 2'-deoxy-2'-fluoroguanosine-3'-phosphate
  modified_base 8: mod_base = OTHER; note = 2'-O-methyladenosine-3'-phosphate
  modified_base 9: mod_base = OTHER; note = 2'-deoxy-2'-fluorouridine-3'-phosphate
  modified_base 10: mod_base = OTHER; note = 2'-deoxy-2'-fluoroadenosine-3'-phosphate
  modified_base 11: mod_base = OTHER; note = 2'-deoxy-2'-fluorouridine-3'-phosphate
  modified_base 12: mod_base = OTHER; note = 2'-O-methyluridine-3'-phosphate
  modified_base 13: mod_base = OTHER; note = 2'-O-methyluridine-3'-phosphate
  modified_base 14: mod_base = OTHER; note = 2'-O-methyluridine-3'-phosphate
  modified_base 15: mod_base = OTHER; note = 2'-O-methyluridine-3'-phosphate
  modified_base 16: mod_base = OTHER; note = 2'-O-methylguanosine-3'-phosphate
  modified_base 17: mod_base = OTHER; note = 2'-O-methyluridine-3'-phosphate
  modified_base 18: mod_base = OTHER; note = 2'-O-methyluridine-3'-phosphate
  modified_base 19: mod_base = OTHER; note = 2'-O-methyluridine-3'-phosphorothioate
  modified_base 20: mod_base = OTHER; note = 2'-O-methylcytidine-3'-phosphorothioate
  modified_base 21: mod_base = OTHER; note = 2'-O-methyladenosine
ttgttggatatttttgtttca

SEQ ID NO: 412 - RNA, 21 nt, synthetic construct
  source 1..21: mol_type = other RNA
  modified_base 1: mod_base = OTHER; note = 2'-O-methyluridine-3'-phosphorothioate
  modified_base 2: mod_base = OTHER; note = 2'-O-methyluridine-3'-phosphorothioate
  modified_base 3: mod_base = OTHER; note = 2'-O-methylcytidine-3'-phosphate
  modified_base 4: mod_base = OTHER; note = 2'-O-methylcytidine-3'-phosphate
  modified_base 5: mod_base = OTHER; note = 2'-O-methylcytidine-3'-phosphate
  modified_base 6: mod_base = OTHER; note = 2'-O-hexadecyl-adenosine-3'-phosphate
  modified_base 7: mod_base = OTHER; note = 2'-deoxy-2'-fluorouridine-3'-phosphate
  modified_base 8: mod_base = OTHER; note = 2'-O-methyladenosine-3'-phosphate
  modified_base 9: mod_base = OTHER; note = 2'-deoxy-2'-fluoroadenosine-3'-phosphate
  modified_base 10: mod_base = OTHER; note = 2'-deoxy-2'-fluoroadenosine-3'-phosphate
  modified_base 11: mod_base = OTHER; note = 2'-deoxy-2'-fluoroadenosine-3'-phosphate
  modified_base 12: mod_base = OTHER; note = 2'-O-methylguanosine-3'-phosphate
  modified_base 13: mod_base = OTHER; note = 2'-O-methylcytidine-3'-phosphate
  modified_base 14: mod_base = OTHER; note = 2'-O-methyladenosine-3'-phosphate
  modified_base 15: mod_base = OTHER; note = 2'-O-methylcytidine-3'-phosphate
  modified_base 16: mod_base = OTHER; note = 2'-O-methyladenosine-3'-phosphate
  modified_base 17: mod_base = OTHER; note = 2'-O-methyluridine-3'-phosphate
  modified_base 18: mod_base = OTHER; note = 2'-O-methylcytidine-3'-phosphate
  modified_base 19: mod_base = OTHER; note = 2'-O-methyladenosine-3'-phosphorothioate
  modified_base 20: mod_base = OTHER; note = 2'-O-methyluridine-3'-phosphorothioate
  modified_base 21: mod_base = OTHER; note = 2'-O-methyladenosine
ttcccataaaagcacatcata

SEQ ID NO: 413 - RNA, 23 nt, synthetic construct
  source 1..23: mol_type = other RNA
  modified_base 1: mod_base = OTHER; note = 2'-O-methyluridine-3'-phosphorothioate 5'-(E)-Vinylphosphonate
  modified_base 2: mod_base = OTHER; note = 2'-deoxy-2'-fluorouridine-3'-phosphorothioate
  modified_base 3: mod_base = OTHER; note = 2'-O-methylcytidine-3'-phosphate
  modified_base 4: mod_base = OTHER; note = 2'-O-methylcytidine-3'-phosphate
  modified_base 5: mod_base = OTHER; note = 2'-O-methyluridine-3'-phosphate
  modified_base 6: mod_base = OTHER; note = 2'-deoxy-2'-fluorocytidine-3'-phosphate
  modified_base 7: mod_base = OTHER; note = 2'-O-methyladenosine-3'-phosphate
  modified_base 8: mod_base = OTHER; note = 2'-deoxy-2'-fluoroguanosine-3'-phosphate
  modified_base 9: mod_base = OTHER; note = 2'-deoxy-2'-fluoroadenosine-3'-phosphate
  modified_base 10: mod_base = OTHER; note = 2'-O-methyluridine-3'-phosphate
  modified_base 11: mod_base = OTHER; note = 2'-O-methyluridine-3'-phosphate
  modified_base 12: mod_base = OTHER; note = 2'-O-methylguanosine-3'-phosphate
  modified_base 13: mod_base = OTHER; note = 2'-O-methylguanosine-3'-phosphate
  modified_base 14: mod_base = OTHER; note = 2'-deoxy-2'-fluoroadenosine-3'-phosphate
  modified_base 15: mod_base = OTHER; note = 2'-O-methyladenosine-3'-phosphate
  modified_base 16: mod_base = OTHER; note = 2'-deoxy-2'-fluorouridine-3'-phosphate
  modified_base 17: mod_base = OTHER; note = 2'-O-methylcytidine-3'-phosphate
  modified_base 18: mod_base = OTHER; note = 2'-O-methylcytidine-3'-phosphate
  modified_base 19: mod_base = OTHER; note = 2'-O-methylcytidine-3'-phosphate
  modified_base 20: mod_base = OTHER; note = 2'-O-methylguanosine-3'-phosphate
  modified_base 21: mod_base = OTHER; note = 2'-O-methylguanosine-3'-phosphorothioate
  modified_base 22: mod_base = OTHER; note = 2'-O-methylguanosine-3'-phosphorothioate
  modified_base 23: mod_base = OTHER; note = 2'-O-methylcytidine
ttcctcagattggaatcccgggc

SEQ ID NO: 414 - RNA, 23 nt, synthetic construct
  source 1..23: mol_type = other RNA
  modified_base 1: mod_base = OTHER; note = 2'-O-methyluridine-3'-phosphorothioate 5'-(E)-Vinylphosphonate
  modified_base 2: mod_base = OTHER; note = 2'-deoxy-2'-fluoroguanosine-3'-phosphorothioate
  modified_base 3: mod_base = OTHER; note = 2'-O-methyluridine-3'-phosphate
  modified_base 4: mod_base = OTHER; note = 2'-O-methylguanosine-3'-phosphate
  modified_base 5: mod_base = OTHER; note = 2'-O-methyladenosine-3'-phosphate
  modified_base 6: mod_base = OTHER; note = 2'-deoxy-2'-fluoroguanosine-3'-phosphate
  modified_base 7: mod_base = OTHER; note = 2'-O-methyladenosine-3'-phosphate
  modified_base 8: mod_base = OTHER; note = 2'-deoxy-2'-fluoroguanosine-3'-phosphate
  modified_base 9: mod_base = OTHER; note = 2'-deoxy-2'-fluorocytidine-3'-phosphate
  modified_base 10: mod_base = OTHER; note = 2'-O-methyladenosine-3'-phosphate
  modified_base 11: mod_base = OTHER; note = 2'-O-methyladenosine-3'-phosphate
  modified_base 12: mod_base = OTHER; note = 2'-O-methylguanosine-3'-phosphate
  modified_base 13: mod_base = OTHER; note = 2'-O-methylguanosine-3'-phosphate
  modified_base 14: mod_base = OTHER; note = 2'-deoxy-2'-fluoroadenosine-3'-phosphate
  modified_base 15: mod_base = OTHER; note = 2'-O-methylguanosine-3'-phosphate
  modified_base 16: mod_base = OTHER; note = 2'-deoxy-2'-fluoroadenosine-3'-phosphate
  modified_base 17: mod_base = OTHER; note = 2'-O-methyladenosine-3'-phosphate
  modified_base 18: mod_base = OTHER; note = 2'-O-methylguanosine-3'-phosphate
  modified_base 19: mod_base = OTHER; note = 2'-O-methylguanosine-3'-phosphate
  modified_base 20: mod_base = OTHER; note = 2'-O-methyladenosine-3'-phosphate
  modified_base 21: mod_base = OTHER; note = 2'-O-methylguanosine-3'-phosphorothioate
  modified_base 22: mod_base = OTHER; note = 2'-O-methylguanosine-3'-phosphorothioate
  modified_base 23: mod_base = OTHER; note = 2'-O-methylcytidine
tgtgagagcaaggagaaggaggc

SEQ ID NO: 415 - RNA, 23 nt, synthetic construct
  source 1..23: mol_type = other RNA
  modified_base 1: mod_base = OTHER; note = 2'-O-methyluridine-3'-phosphorothioate 5'-(E)-Vinylphosphonate
  modified_base 2: mod_base = OTHER; note = 2'-deoxy-2'-fluorocytidine-3'-phosphorothioate
  modified_base 3: mod_base = OTHER; note = 2'-O-methyladenosine-3'-phosphate
  modified_base 4: mod_base = OTHER; note = 2'-O-methylguanosine-3'-phosphate
  modified_base 5: mod_base = OTHER; note = 2'-O-methylcytidine-3'-phosphate
  modified_base 6: mod_base = OTHER; note = 2'-deoxy-2'-fluorouridine-3'-phosphate
  modified_base 7: mod_base = OTHER; note = 2'-O-methylcytidine-3'-phosphate
  modified_base 8: mod_base = OTHER; note = 2'-deoxy-2'-fluorouridine-3'-phosphate
  modified_base 9: mod_base = OTHER; note = 2'-deoxy-2'-fluoroguanosine-3'-phosphate
  modified_base 10: mod_base = OTHER; note = 2'-O-methyluridine-3'-phosphate
  modified_base 11: mod_base = OTHER; note = 2'-O-methyladenosine-3'-phosphate
  modified_base 12: mod_base = OTHER; note = 2'-O-methyluridine-3'-phosphate
  modified_base 13: mod_base = OTHER; note = 2'-O-methylcytidine-3'-phosphate
  modified_base 14: mod_base = OTHER; note = 2'-deoxy-2'-fluorocytidine-3'-phosphate
  modified_base 15: mod_base = OTHER; note = 2'-O-methyluridine-3'-phosphate
  modified_base 16: mod_base = OTHER; note = 2'-deoxy-2'-fluorocytidine-3'-phosphate
  modified_base 17: mod_base = OTHER; note = 2'-O-methyladenosine-3'-phosphate
  modified_base 18: mod_base = OTHER; note = 2'-O-methylguanosine-3'-phosphate
  modified_base 19: mod_base = OTHER; note = 2'-O-methylguanosine-3'-phosphate
  modified_base 20: mod_base = OTHER; note = 2'-O-methyluridine-3'-phosphate
  modified_base 21: mod_base = OTHER; note = 2'-O-methylguanosine-3'-phosphorothioate
  modified_base 22: mod_base = OTHER; note = 2'-O-methylcytidine-3'-phosphorothioate
  modified_base 23: mod_base = OTHER; note = 2'-O-methyluridine
tcagctctgtatcctcaggtgct

SEQ ID NO: 416 - RNA, 23 nt, synthetic construct
  source 1..23: mol_type = other RNA
  modified_base 1: mod_base = OTHER; note = 2'-O-methyluridine-3'-phosphorothioate 5'-(E)-Vinylphosphonate
  modified_base 2: mod_base = OTHER; note = 2'-deoxy-2'-fluorocytidine-3'-phosphorothioate
  modified_base 3: mod_base = OTHER; note = 2'-O-methylguanosine-3'-phosphate
  modified_base 4: mod_base = OTHER; note = 2'-O-methyladenosine-3'-phosphate
  modified_base 5: mod_base = OTHER; note = 2'-O-methyladenosine-3'-phosphate
  modified_base 6: mod_base = OTHER; note = 2'-deoxy-2'-fluorocytidine-3'-phosphate
  modified_base 7: mod_base = OTHER; note = 2'-O-methylcytidine-3'-phosphate
  modified_base 8: mod_base = OTHER; note = 2'-deoxy-2'-fluorouridine-3'-phosphate
  modified_base 9: mod_base = OTHER; note = 2'-deoxy-2'-fluorocytidine-3'-phosphate
  modified_base 10: mod_base = OTHER; note = 2'-O-methyladenosine-3'-phosphate
  modified_base 11: mod_base = OTHER; note = 2'-O-methylcytidine-3'-phosphate
  modified_base 12: mod_base = OTHER; note = 2'-O-methyluridine-3'-phosphate
  modified_base 13: mod_base = OTHER; note = 2'-O-methylcytidine-3'-phosphate
  modified_base 14: mod_base = OTHER; note = 2'-deoxy-2'-fluoroadenosine-3'-phosphate
  modified_base 15: mod_base = OTHER; note = 2'-O-methyluridine-3'-phosphate
  modified_base 16: mod_base = OTHER; note = 2'-deoxy-2'-fluorocytidine-3'-phosphate
  modified_base 17: mod_base = OTHER; note = 2'-O-methyladenosine-3'-phosphate
  modified_base 18: mod_base = OTHER; note = 2'-O-methylcytidine-3'-phosphate
  modified_base 19: mod_base = OTHER; note = 2'-O-methylcytidine-3'-phosphate
  modified_base 20: mod_base = OTHER; note = 2'-O-methyluridine-3'-phosphate
  modified_base 21: mod_base = OTHER; note = 2'-O-methylguanosine-3'-phosphorothioate
  modified_base 22: mod_base = OTHER; note = 2'-O-methylguanosine-3'-phosphorothioate
  modified_base 23: mod_base = OTHER; note = 2'-O-methylguanosine
tcgaacctcactcatcacctggg

SEQ ID NO: 417 - RNA, 23 nt, synthetic construct
  source 1..23: mol_type = other RNA
  modified_base 1: mod_base = OTHER; note = 2'-O-methyluridine-3'-phosphorothioate 5'-(E)-Vinylphosphonate
  modified_base 2: mod_base = OTHER; note = 2'-deoxy-2'-fluorouridine-3'-phosphorothioate
  modified_base 3: mod_base = OTHER; note = 2'-O-methyluridine-3'-phosphate
  modified_base 4: mod_base = OTHER; note = 2'-O-methyladenosine-3'-phosphate
  modified_base 5: mod_base = OTHER; note = 2'-O-methyladenosine-3'-phosphate
  modified_base 6: mod_base = OTHER; note = 2'-deoxy-2'-fluoroadenosine-3'-phosphate
  modified_base 7: mod_base = OTHER; note = 2'-O-methyluridine-3'-phosphate
  modified_base 8: mod_base = OTHER; note = 2'-deoxy-2'-fluorocytidine-3'-phosphate
  modified_base 9: mod_base = OTHER; note = 2'-deoxy-2'-fluorouridine-3'-phosphate
  modified_base 10: mod_base = OTHER; note = 2'-O-methyluridine-3'-phosphate
  modified_base 11: mod_base = OTHER; note = 2'-O-methylcytidine-3'-phosphate
  modified_base 12: mod_base = OTHER; note = 2'-O-methylcytidine-3'-phosphate
  modified_base 13: mod_base = OTHER; note = 2'-O-methylguanosine-3'-phosphate
  modified_base 14: mod_base = OTHER; note = 2'-deoxy-2'-fluorouridine-3'-phosphate
  modified_base 15: mod_base = OTHER; note = 2'-O-methyluridine-3'-phosphate
  modified_base 16: mod_base = OTHER; note = 2'-deoxy-2'-fluorocytidine-3'-phosphate
  modified_base 17: mod_base = OTHER; note = 2'-O-methyluridine-3'-phosphate
  modified_base 18: mod_base = OTHER; note = 2'-O-methyluridine-3'-phosphate
  modified_base 19: mod_base = OTHER; note = 2'-O-methylcytidine-3'-phosphate
  modified_base 20: mod_base = OTHER; note = 2'-O-methylguanosine-3'-phosphate
  modified_base 21: mod_base = OTHER; note = 2'-O-methyladenosine-3'-phosphorothioate
  modified_base 22: mod_base = OTHER; note = 2'-O-methyladenosine-3'-phosphorothioate
  modified_base 23: mod_base = OTHER; note = 2'-O-methylcytidine
tttaaatcttccgttcttcgaac

SEQ ID NO: 418 - RNA, 23 nt, synthetic construct
  source 1..23: mol_type = other RNA
  modified_base 1: mod_base = OTHER; note = 2'-O-methyluridine-3'-phosphorothioate 5'-(E)-Vinylphosphonate
  modified_base 2: mod_base = OTHER; note = 2'-deoxy-2'-fluorouridine-3'-phosphorothioate
  modified_base 3: mod_base = OTHER; note = 2'-O-methylcytidine-3'-phosphate
  modified_base 4: mod_base = OTHER; note = 2'-O-methyluridine-3'-phosphate
  modified_base 5: mod_base = OTHER; note = 2'-O-methyluridine-3'-phosphate
  modified_base 6: mod_base = OTHER; note = 2'-deoxy-2'-fluorouridine-3'-phosphate
  modified_base 7: mod_base = OTHER; note = 2'-O-methylcytidine-3'-phosphate
  modified_base 8: mod_base = OTHER; note = 2'-deoxy-2'-fluoroadenosine-3'-phosphate
  modified_base 9: mod_base = OTHER; note = 2'-deoxy-2'-fluorouridine-3'-phosphate
  modified_base 10: mod_base = OTHER; note = 2'-O-methyluridine-3'-phosphate
  modified_base 11: mod_base = OTHER; note = 2'-O-methylcytidine-3'-phosphate
  modified_base 12: mod_base = OTHER; note = 2'-O-methyladenosine-3'-phosphate
  modified_base 13: mod_base = OTHER; note = 2'-O-methyladenosine-3'-phosphate
  modified_base 14: mod_base = OTHER; note = 2'-deoxy-2'-fluorouridine-3'-phosphate
  modified_base 15: mod_base = OTHER; note = 2'-O-methyladenosine-3'-phosphate
  modified_base 16: mod_base = OTHER; note = 2'-deoxy-2'-fluorocytidine-3'-phosphate
  modified_base 17: mod_base = OTHER; note = 2'-O-methylguanosine-3'-phosphate
  modified_base 18: mod_base = OTHER; note = 2'-O-methylguanosine-3'-phosphate
  modified_base 19: mod_base = OTHER; note = 2'-O-methyladenosine-3'-phosphate
  modified_base 20: mod_base = OTHER; note = 2'-O-methylguanosine-3'-phosphate
  modified_base 21: mod_base = OTHER; note = 2'-O-methylguanosine-3'-phosphorothioate
  modified_base 22: mod_base = OTHER; note = 2'-O-methylcytidine-3'-phosphorothioate
  modified_base 23: mod_base = OTHER; note = 2'-O-methylcytidine
ttctttcattcaatacggaggcc

SEQ ID NO: 419 - RNA, 23 nt, synthetic construct
  source 1..23: mol_type = other RNA
  modified_base 1: mod_base = OTHER; note = 2'-O-methyluridine-3'-phosphorothioate 5'-(E)-Vinylphosphonate
  modified_base 2: mod_base = OTHER; note = 2'-deoxy-2'-fluorouridine-3'-phosphorothioate
  modified_base 3: mod_base = OTHER; note = 2'-O-methyluridine-3'-phosphate
  modified_base 4: mod_base = OTHER; note = 2'-O-methylcytidine-3'-phosphate
  modified_base 5: mod_base = OTHER; note = 2'-O-methyladenosine-3'-phosphate
  modified_base 6: mod_base = OTHER; note = 2'-deoxy-2'-fluorouridine-3'-phosphate
  modified_base 7: mod_base = OTHER; note = 2'-O-methylguanosine-3'-phosphate
  modified_base 8: mod_base = OTHER; note = 2'-deoxy-2'-fluoroguanosine-3'-phosphate
  modified_base 9: mod_base = OTHER; note = 2'-deoxy-2'-fluorouridine-3'-phosphate
  modified_base 10: mod_base = OTHER; note = 2'-O-methylguanosine-3'-phosphate
  modified_base 11: mod_base = OTHER; note = 2'-O-methyladenosine-3'-phosphate
  modified_base 12: mod_base = OTHER; note = 2'-O-methyluridine-3'-phosphate
  modified_base 13: mod_base = OTHER; note = 2'-O-methylguanosine-3'-phosphate
  modified_base 14: mod_base = OTHER; note = 2'-deoxy-2'-fluorouridine-3'-phosphate
  modified_base 15: mod_base = OTHER; note = 2'-O-methylcytidine-3'-phosphate
  modified_base 16: mod_base = OTHER; note = 2'-deoxy-2'-fluorouridine-3'-phosphate
  modified_base 17: mod_base = OTHER; note = 2'-O-methyluridine-3'-phosphate
  modified_base 18: mod_base = OTHER; note = 2'-O-methyluridine-3'-phosphate
  modified_base 19: mod_base = OTHER; note = 2'-O-methylguanosine-3'-phosphate
  modified_base 20: mod_base = OTHER; note = 2'-O-methylcytidine-3'-phosphate
  modified_base 21: mod_base = OTHER; note = 2'-O-methyladenosine-3'-phosphorothioate
  modified_base 22: mod_base = OTHER; note = 2'-O-methylcytidine-3'-phosphorothioate
  modified_base 23: mod_base = OTHER; note = 2'-O-methyluridine
tttcatggtgatgtctttgcact

SEQ ID NO: 420 - RNA, 23 nt, synthetic construct
  source 1..23: mol_type = other RNA
  modified_base 1: mod_base = OTHER; note = 2'-O-methyluridine-3'-phosphorothioate 5'-(E)-Vinylphosphonate
  modified_base 2: mod_base = OTHER; note = 2'-deoxy-2'-fluorouridine-3'-phosphorothioate
  modified_base 3: mod_base = OTHER; note = 2'-O-methyladenosine-3'-phosphate
  modified_base 4: mod_base = OTHER; note = 2'-O-methyladenosine-3'-phosphate
  modified_base 5: mod_base = OTHER; note = 2'-O-methylguanosine-3'-phosphate
  modified_base 6: mod_base = OTHER; note = 2'-deoxy-2'-fluoroguanosine-3'-phosphate
  modified_base 7: mod_base = OTHER; note = 2'-O-methyladenosine-3'-phosphate
  modified_base 8: mod_base = OTHER; note = 2'-deoxy-2'-fluoroadenosine-3'-phosphate
  modified_base 9: mod_base = OTHER; note = 2'-deoxy-2'-fluorouridine-3'-phosphate
  modified_base 10: mod_base = OTHER; note = 2'-O-methylguanosine-3'-phosphate
  modified_base 11: mod_base = OTHER; note = 2'-O-methylcytidine-3'-phosphate
  modified_base 12: mod_base = OTHER; note = 2'-O-methyluridine-3'-phosphate
  modified_base 13: mod_base = OTHER; note = 2'-O-methyladenosine-3'-phosphate
  modified_base 14: mod_base = OTHER; note = 2'-deoxy-2'-fluoroguanosine-3'-phosphate
  modified_base 15: mod_base = OTHER; note = 2'-O-methyluridine-3'-phosphate
  modified_base 16: mod_base = OTHER; note = 2'-deoxy-2'-fluoroguanosine-3'-phosphate
  modified_base 17: mod_base = OTHER; note = 2'-O-methyluridine-3'-phosphate
  modified_base 18: mod_base = OTHER; note = 2'-O-methyluridine-3'-phosphate
  modified_base 19: mod_base = OTHER; note = 2'-O-methylcytidine-3'-phosphate
  modified_base 20: mod_base = OTHER; note = 2'-O-methyladenosine-3'-phosphate
  modified_base 21: mod_base = OTHER; note = 2'-O-methyluridine-3'-phosphorothioate
  modified_base 22: mod_base = OTHER; note = 2'-O-methylguanosine-3'-phosphorothioate
  modified_base 23: mod_base = OTHER; note = 2'-O-methylguanosine
ttaaggaatgctagtgttcatgg

SEQ ID NO: 421 - RNA, 23 nt, synthetic construct
  source 1..23: mol_type = other RNA
  modified_base 1: mod_base = OTHER; note = 2'-O-methyluridine-3'-phosphorothioate 5'-(E)-Vinylphosphonate
  modified_base 2: mod_base = OTHER; note = 2'-deoxy-2'-fluorouridine-3'-phosphorothioate
  modified_base 3: mod_base = OTHER; note = 2'-O-methyladenosine-3'-phosphate
  modified_base 4: mod_base = OTHER; note = 2'-O-methyladenosine-3'-phosphate
  modified_base 5: mod_base = OTHER; note = 2'-O-methylguanosine-3'-phosphate
  modified_base 6: mod_base = OTHER; note = 2'-deoxy-2'-fluoroguanosine-3'-phosphate
  modified_base 7: mod_base = OTHER; note = 2'-O-methyladenosine-3'-phosphate
  modified_base 8: mod_base = OTHER; note = 2'-deoxy-2'-fluorouridine-3'-phosphate
  modified_base 9: mod_base = OTHER; note = 2'-deoxy-2'-fluorouridine-3'-phosphate
  modified_base 10: mod_base = OTHER; note = 2'-O-methylcytidine-3'-phosphate
  modified_base 11: mod_base = OTHER; note = 2'-O-methyluridine-3'-phosphate
  modified_base 12: mod_base = OTHER; note = 2'-O-methylguanosine-3'-phosphate
  modified_base 13: mod_base = OTHER; note = 2'-O-methylcytidine-3'-phosphate
  modified_base 14: mod_base = OTHER; note = 2'-deoxy-2'-fluorouridine-3'-phosphate
  modified_base 15: mod_base = OTHER; note = 2'-O-methylguanosine-3'-phosphate
  modified_base 16: mod_base = OTHER; note = 2'-deoxy-2'-fluoroadenosine-3'-phosphate
  modified_base 17: mod_base = OTHER; note = 2'-O-methyluridine-3'-phosphate
  modified_base 18: mod_base = OTHER; note = 2'-O-methyladenosine-3'-phosphate
  modified_base 19: mod_base = OTHER; note = 2'-O-methyladenosine-3'-phosphate
  modified_base 20: mod_base = OTHER; note = 2'-O-methylguanosine-3'-phosphate
  modified_base 21: mod_base = OTHER; note = 2'-O-methylguanosine-3'-phosphorothioate
  modified_base 22: mod_base = OTHER; note = 2'-O-methyladenosine-3'-phosphorothioate
  modified_base 23: mod_base = OTHER; note = 2'-O-methyladenosine
ttaaggattctgctgataaggaa

SEQ ID NO: 422 - RNA, 23 nt, synthetic construct
  source 1..23: mol_type = other RNA
  modified_base 1: mod_base = OTHER; note = 2'-O-methyluridine-3'-phosphorothioate 5'-(E)-Vinylphosphonate
  modified_base 2: mod_base = OTHER; note = 2'-deoxy-2'-fluorocytidine-3'-phosphorothioate
  modified_base 3: mod_base = OTHER; note = 2'-O-methyladenosine-3'-phosphate
  modified_base 4: mod_base = OTHER; note = 2'-O-methylcytidine-3'-phosphate
  modified_base 5: mod_base = OTHER; note = 2'-O-methyluridine-3'-phosphate
  modified_base 6: mod_base = OTHER; note = 2'-deoxy-2'-fluoroguanosine-3'-phosphate
  modified_base 7: mod_base = OTHER; note = 2'-O-methylguanosine-3'-phosphate
  modified_base 8: mod_base = OTHER; note = 2'-deoxy-2'-fluoroadenosine-3'-phosphate
  modified_base 9: mod_base = OTHER; note = 2'-deoxy-2'-fluorouridine-3'-phosphate
  modified_base 10: mod_base = OTHER; note = 2'-O-methylguanosine-3'-phosphate
  modified_base 11: mod_base = OTHER; note = 2'-O-methyladenosine-3'-phosphate
  modified_base 12: mod_base = OTHER; note = 2'-O-methylcytidine-3'-phosphate
  modified_base 13: mod_base = OTHER; note = 2'-O-methyladenosine-3'-phosphate
  modified_base 14: mod_base = OTHER; note = 2'-deoxy-2'-fluorouridine-3'-phosphate
  modified_base 15: mod_base = OTHER; note = 2'-O-methyluridine-3'-phosphate
  modified_base 16: mod_base = OTHER; note = 2'-deoxy-2'-fluoroguanosine-3'-phosphate
  modified_base 17: mod_base = OTHER; note = 2'-O-methylguanosine-3'-phosphate
  modified_base 18: mod_base = OTHER; note = 2'-O-methyladenosine-3'-phosphate
  modified_base 19: mod_base = OTHER; note = 2'-O-methylguanosine-3'-phosphate
  modified_base 20: mod_base = OTHER; note = 2'-O-methylcytidine-3'-phosphate
  modified_base 21: mod_base = OTHER; note = 2'-O-methyluridine-3'-phosphorothioate
  modified_base 22: mod_base = OTHER; note = 2'-O-methylguanosine-3'-phosphorothioate
  modified_base 23: mod_base = OTHER; note = 2'-O-methylcytidine
tcactggatgacattggagctgc

SEQ ID NO: 423 - RNA, 23 nt, synthetic construct
  source 1..23: mol_type = other RNA
  modified_base 1: mod_base = OTHER; note = 2'-O-methyluridine-3'-phosphorothioate 5'-(E)-Vinylphosphonate
  modified_base 2: mod_base = OTHER; note = 2'-deoxy-2'-fluoroadenosine-3'-phosphorothioate
  modified_base 3: mod_base = OTHER; note = 2'-O-methyluridine-3'-phosphate
  modified_base 4: mod_base = OTHER; note = 2'-O-methylcytidine-3'-phosphate
  modified_base 5: mod_base = OTHER; note = 2'-O-methyluridine-3'-phosphate
  modified_base 6: mod_base = OTHER; note = 2'-deoxy-2'-fluoroguanosine-3'-phosphate
  modified_base 7: mod_base = OTHER; note = 2'-O-methyladenosine-3'-phosphate
  modified_base 8: mod_base = OTHER; note = 2'-deoxy-2'-fluorouridine-3'-phosphate
  modified_base 9: mod_base = OTHER; note = 2'-deoxy-2'-fluoroguanosine-3'-phosphate
  modified_base 10: mod_base = OTHER; note = 2'-O-methyluridine-3'-phosphate
  modified_base 11: mod_base = OTHER; note = 2'-O-methylguanosine-3'-phosphate
  modified_base 12: mod_base = OTHER; note = 2'-O-methylguanosine-3'-phosphate
  modified_base 13: mod_base = OTHER; note = 2'-O-methyladenosine-3'-phosphate
  modified_base 14: mod_base = OTHER; note = 2'-deoxy-2'-fluoroadenosine-3'-phosphate
  modified_base 15: mod_base = OTHER; note = 2'-O-methylguanosine-3'-phosphate
  modified_base 16: mod_base = OTHER; note = 2'-deoxy-2'-fluorouridine-3'-phosphate
  modified_base 17: mod_base = OTHER; note = 2'-O-methylguanosine-3'-phosphate
  modified_base 18: mod_base = OTHER; note = 2'-O-methylguanosine-3'-phosphate
  modified_base 19: mod_base = OTHER; note = 2'-O-methyluridine-3'-phosphate
  modified_base 20: mod_base = OTHER; note = 2'-O-methyluridine-3'-phosphate
  modified_base 21: mod_base = OTHER; note = 2'-O-methylguanosine-3'-phosphorothioate
  modified_base 22: mod_base = OTHER; note = 2'-O-methyluridine-3'-phosphorothioate
  modified_base 23: mod_base = OTHER; note = 2'-O-methyluridine
tatctgatgtggaagtggttgtt

SEQ ID NO: 424 - RNA, 23 nt, synthetic construct
  source 1..23: mol_type = other RNA
  modified_base 1: mod_base = OTHER; note = 2'-O-methyluridine-3'-phosphorothioate 5'-(E)-Vinylphosphonate
  modified_base 2: mod_base = OTHER; note = 2'-deoxy-2'-fluoroadenosine-3'-phosphorothioate
  modified_base 3: mod_base = OTHER; note = 2'-O-methyluridine-3'-phosphate
  modified_base 4: mod_base = OTHER; note = 2'-O-methyladenosine-3'-phosphate
  modified_base 5: mod_base = OTHER; note = 2'-O-methylcytidine-3'-phosphate
  modified_base 6: mod_base = OTHER; note = 2'-deoxy-2'-fluorouridine-3'-phosphate
  modified_base 7: mod_base = OTHER; note = 2'-O-methyluridine-3'-phosphate
  modified_base 8: mod_base = OTHER; note = 2'-deoxy-2'-fluoroguanosine-3'-phosphate
  modified_base 9: mod_base = OTHER; note = 2'-deoxy-2'-fluoroadenosine-3'-phosphate
  modified_base 10: mod_base = OTHER; note = 2'-O-methylcytidine-3'-phosphate
  modified_base 11: mod_base = OTHER; note = 2'-O-methyladenosine-3'-phosphate
  modified_base 12: mod_base = OTHER; note = 2'-O-methylguanosine-3'-phosphate
  modified_base 13: mod_base = OTHER; note = 2'-O-methylguanosine-3'-phosphate
  modified_base 14: mod_base = OTHER; note = 2'-deoxy-2'-fluorouridine-3'-phosphate
  modified_base 15: mod_base = OTHER; note = 2'-O-methylguanosine-3'-phosphate
  modified_base 16: mod_base = OTHER; note = 2'-deoxy-2'-fluoroadenosine-3'-phosphate
  modified_base 17: mod_base = OTHER; note = 2'-O-methyladenosine-3'-phosphate
  modified_base 18: mod_base = OTHER; note = 2'-O-methylguanosine-3'-phosphate
  modified_base 19: mod_base = OTHER; note = 2'-O-methylcytidine-3'-phosphate
  modified_base 20: mod_base = OTHER; note = 2'-O-methyladenosine-3'-phosphate
  modified_base 21: mod_base = OTHER; note = 2'-O-methyluridine-3'-phosphorothioate
  modified_base 22: mod_base = OTHER; note = 2'-O-methylcytidine-3'-phosphorothioate
  modified_base 23: mod_base = OTHER; note = 2'-O-methyluridine
tatacttgacaggtgaagcatct

SEQ ID NO: 425 - RNA, 23 nt, synthetic construct
  source 1..23: mol_type = other RNA
  modified_base 1: mod_base = OTHER; note = 2'-O-methyluridine-3'-phosphorothioate 5'-(E)-Vinylphosphonate
  modified_base 2: mod_base = OTHER; note = 2'-deoxy-2'-fluoroguanosine-3'-phosphorothioate
  modified_base 3: mod_base = OTHER; note = 2'-O-methylguanosine-3'-phosphate
  modified_base 4: mod_base = OTHER; note = 2'-O-methyluridine-3'-phosphate
  modified_base 5: mod_base = OTHER; note = 2'-O-methyluridine-3'-phosphate
  modified_base 6: mod_base = OTHER; note = 2'-deoxy-2'-fluorocytidine-3'-phosphate
  modified_base 7: mod_base = OTHER; note = 2'-O-methyluridine-3'-phosphate
  modified_base 8: mod_base = OTHER; note = 2'-deoxy-2'-fluorouridine-3'-phosphate
  modified_base 9: mod_base = OTHER; note = 2'-deoxy-2'-fluoroguanosine-3'-phosphate
  modified_base 10: mod_base = OTHER; note = 2'-O-methyladenosine-3'-phosphate
  modified_base 11: mod_base = OTHER; note = 2'-O-methyladenosine-3'-phosphate
  modified_base 12: mod_base = OTHER; note = 2'-O-methylguanosine-3'-phosphate
  modified_base 13: mod_base = OTHER; note = 2'-O-methyladenosine-3'-phosphate
  modified_base 14: mod_base = OTHER; note = 2'-deoxy-2'-fluoroadenosine-3'-phosphate
  modified_base 15: mod_base = OTHER; note = 2'-O-methylguanosine-3'-phosphate
  modified_base 16: mod_base = OTHER; note = 2'-deoxy-2'-fluoroadenosine-3'-phosphate
  modified_base 17: mod_base = OTHER; note = 2'-O-methyladenosine-3'-phosphate
  modified_base 18: mod_base = OTHER; note = 2'-O-methylguanosine-3'-phosphate
  modified_base 19: mod_base = OTHER; note = 2'-O-methylcytidine-3'-phosphate
  modified_base 20: mod_base = OTHER; note = 2'-O-methylcytidine-3'-phosphate
  modified_base 21: mod_base = OTHER; note = 2'-O-methyluridine-3'-phosphorothioate
  modified_base 22: mod_base = OTHER; note = 2'-O-methylguanosine-3'-phosphorothioate
  modified_base 23: mod_base = OTHER; note = 2'-O-methyladenosine
tggttcttgaagaagaagcctga

SEQ ID NO: 426 - RNA, 23 nt, synthetic construct
  source 1..23: mol_type = other RNA
  modified_base 1: mod_base = OTHER; note = 2'-O-methyluridine-3'-phosphorothioate 5'-(E)-Vinylphosphonate
  modified_base 2: mod_base = OTHER; note = 2'-deoxy-2'-fluoroguanosine-3'-phosphorothioate
  modified_base 3: mod_base = OTHER; note = 2'-O-methyluridine-3'-phosphate
  modified_base 4: mod_base = OTHER; note = 2'-O-methylguanosine-3'-phosphate
  modified_base 5: mod_base = OTHER; note = 2'-O-methylcytidine-3'-phosphate
  modified_base 6: mod_base = OTHER; note = 2'-deoxy-2'-fluoroadenosine-3'-phosphate
  modified_base 7: mod_base = OTHER; note = 2'-O-methylguanosine-3'-phosphate
  modified_base 8: mod_base = OTHER; note = 2'-deoxy-2'-fluoroadenosine-3'-phosphate
  modified_base 9: mod_base = OTHER; note = 2'-deoxy-2'-fluorouridine-3'-phosphate
  modified_base 10: mod_base = OTHER; note = 2'-O-methylguanosine-3'-phosphate
  modified_base 11: mod_base = OTHER; note = 2'-O-methyluridine-3'-phosphate
  modified_base 12: mod_base = OTHER; note = 2'-O-methyladenosine-3'-phosphate
  modified_base 13: mod_base = OTHER; note = 2'-O-methylcytidine-3'-phosphate
  modified_base 14: mod_base = OTHER; note = 2'-deoxy-2'-fluorouridine-3'-phosphate
  modified_base 15: mod_base = OTHER; note = 2'-O-methylcytidine-3'-phosphate
  modified_base 16: mod_base = OTHER; note = 2'-deoxy-2'-fluorocytidine-3'-phosphate
  modified_base 17: mod_base = OTHER; note = 2'-O-methyluridine-3'-phosphate
  modified_base 18: mod_base = OTHER; note = 2'-O-methylguanosine-3'-phosphate
  modified_base 19: mod_base = OTHER; note = 2'-O-methylguanosine-3'-phosphate
  modified_base 20: mod_base = OTHER; note = 2'-O-methyluridine-3'-phosphate
  modified_base 21: mod_base = OTHER; note = 2'-O-methyluridine-3'-phosphorothioate
  modified_base 22: mod_base = OTHER; note = 2'-O-methylcytidine-3'-phosphorothioate
  modified_base 23: mod_base = OTHER; note = 2'-O-methyluridine
tgtgcagatgtactcctggttct

SEQ ID NO: 427 - RNA, 23 nt, synthetic construct
  source 1..23: mol_type = other RNA
  modified_base 1: mod_base = OTHER; note = 2'-O-methyluridine-3'-phosphorothioate 5'-(E)-Vinylphosphonate
  modified_base 2: mod_base = OTHER; note = 2'-deoxy-2'-fluorocytidine-3'-phosphorothioate
  modified_base 3: mod_base = OTHER; note = 2'-O-methylcytidine-3'-phosphate
  modified_base 4: mod_base = OTHER; note = 2'-O-methyladenosine-3'-phosphate
  modified_base 5: mod_base = OTHER; note = 2'-O-methyluridine-3'-phosphate
  modified_base 6: mod_base = OTHER; note = 2'-deoxy-2'-fluoroadenosine-3'-phosphate
  modified_base 7: mod_base = OTHER; note = 2'-O-methylguanosine-3'-phosphate
  modified_base 8: mod_base = OTHER; note = 2'-deoxy-2'-fluoroadenosine-3'-phosphate
  modified_base 9: mod_base = OTHER; note = 2'-deoxy-2'-fluoroguanosine-3'-phosphate
  modified_base 10: mod_base = OTHER; note = 2'-O-methyluridine-3'-phosphate
  modified_base 11: mod_base = OTHER; note = 2'-O-methyluridine-3'-phosphate
  modified_base 12: mod_base = OTHER; note = 2'-O-methylguanosine-3'-phosphate
  modified_base 13: mod_base = OTHER; note = 2'-O-methylcytidine-3'-phosphate
  modified_base 14: mod_base = OTHER; note = 2'-deoxy-2'-fluorouridine-3'-phosphate
  modified_base 15: mod_base = OTHER; note = 2'-O-methylguanosine-3'-phosphate
  modified_base 16: mod_base = OTHER; note = 2'-deoxy-2'-fluoroguanosine-3'-phosphate
  modified_base 17: mod_base = OTHER; note = 2'-O-methyluridine-3'-phosphate
  modified_base 18: mod_base = OTHER; note = 2'-O-methyladenosine-3'-phosphate
  modified_base 19: mod_base = OTHER; note = 2'-O-methylguanosine-3'-phosphate
  modified_base 20: mod_base = OTHER; note = 2'-O-methyluridine-3'-phosphate
  modified_base 21: mod_base = OTHER; note = 2'-O-methylcytidine-3'-phosphorothioate
  modified_base 22: mod_base = OTHER; note = 2'-O-methylcytidine-3'-phosphorothioate
  modified_base 23: mod_base = OTHER; note = 2'-O-methyluridine
tccatagagttgctggtagtcct

SEQ ID NO: 428 - RNA, 23 nt, synthetic construct
  source 1..23: mol_type = other RNA
  modified_base 1: mod_base = OTHER; note = 2'-O-methyluridine-3'-phosphorothioate 5'-(E)-Vinylphosphonate
  modified_base 2: mod_base = OTHER; note = 2'-deoxy-2'-fluorouridine-3'-phosphorothioate
  modified_base 3: mod_base = OTHER; note = 2'-O-methyluridine-3'-phosphate
  modified_base 4: mod_base = OTHER; note = 2'-O-methylcytidine-3'-phosphate
  modified_base 5: mod_base = OTHER; note = 2'-O-methylguanosine-3'-phosphate
  modified_base 6: mod_base = OTHER; note = 2'-deoxy-2'-fluorocytidine-3'-phosphate
  modified_base 7: mod_base = OTHER; note = 2'-O-methylcytidine-3'-phosphate
  modified_base 8: mod_base = OTHER; note = 2'-deoxy-2'-fluorouridine-3'-phosphate
  modified_base 9: mod_base = OTHER; note = 2'-deoxy-2'-fluoroguanosine-3'-phosphate
  modified_base 10: mod_base = OTHER; note = 2'-O-methyluridine-3'-phosphate
  modified_base 11: mod_base = OTHER; note = 2'-O-methylguanosine-3'-phosphate
  modified_base 12: mod_base = OTHER; note = 2'-O-methyladenosine-3'-phosphate
  modified_base 13: mod_base = OTHER; note = 2'-O-methyluridine-3'-phosphate
  modified_base 14: mod_base = OTHER; note = 2'-deoxy-2'-fluoroguanosine-3'-phosphate
  modified_base 15: mod_base = OTHER; note = 2'-O-methyladenosine-3'-phosphate
  modified_base 16: mod_base = OTHER; note = 2'-deoxy-2'-fluoroadenosine-3'-phosphate
  modified_base 17: mod_base = OTHER; note = 2'-O-methylguanosine-3'-phosphate
  modified_base 18: mod_base = OTHER; note = 2'-O-methyluridine-3'-phosphate
  modified_base 19: mod_base = OTHER; note = 2'-O-methylcytidine-3'-phosphate
  modified_base 20: mod_base = OTHER; note = 2'-O-methylcytidine-3'-phosphate
  modified_base 21: mod_base = OTHER; note = 2'-O-methylcytidine-3'-phosphorothioate
  modified_base 22: mod_base = OTHER; note = 2'-O-methylguanosine-3'-phosphorothioate
  modified_base 23: mod_base = OTHER; note = 2'-O-methylguanosine
tttcgcctgtgatgaagtcccgg

SEQ ID NO: 429 - RNA, 23 nt, synthetic construct
  source 1..23: mol_type = other RNA
  modified_base 1: mod_base = OTHER; note = 2'-O-methyluridine-3'-phosphorothioate 5'-(E)-Vinylphosphonate
  modified_base 2: mod_base = OTHER; note = 2'-deoxy-2'-fluoroadenosine-3'-phosphorothioate
  modified_base 3: mod_base = OTHER; note = 2'-O-methylguanosine-3'-phosphate
  modified_base 4: mod_base = OTHER; note = 2'-O-methylcytidine-3'-phosphate
  modified_base 5: mod_base = OTHER; note = 2'-O-methyluridine-3'-phosphate
  modified_base 6: mod_base = OTHER; note = 2'-deoxy-2'-fluoroguanosine-3'-phosphate
  modified_base 7: mod_base = OTHER; note = 2'-O-methylcytidine-3'-phosphate
  modified_base 8: mod_base = OTHER; note = 2'-deoxy-2'-fluoroadenosine-3'-phosphate
  modified_base 9: mod_base = OTHER; note = 2'-deoxy-2'-fluorocytidine-3'-phosphate
  modified_base 10: mod_base = OTHER; note = 2'-O-methyladenosine-3'-phosphate
  modified_base 11: mod_base = OTHER; note = 2'-O-methylcytidine-3'-phosphate
  modified_base 12: mod_base = OTHER; note = 2'-O-methylguanosine-3'-phosphate
  modified_base 13: mod_base = OTHER; note = 2'-O-methyladenosine-3'-phosphate
  modified_base 14: mod_base = OTHER; note = 2'-deoxy-2'-fluoroadenosine-3'-phosphate
  modified_base 15: mod_base = OTHER; note = 2'-O-methylguanosine-3'-phosphate
  modified_base 16: mod_base = OTHER; note = 2'-deoxy-2'-fluorocytidine-3'-phosphate
  modified_base 17: mod_base = OTHER; note = 2'-O-methyladenosine-3'-phosphate
  modified_base 18: mod_base = OTHER; note = 2'-O-methylcytidine-3'-phosphate
  modified_base 19: mod_base = OTHER; note = 2'-O-methyluridine-3'-phosphate
  modified_base 20: mod_base = OTHER; note = 2'-O-methyluridine-3'-phosphate
  modified_base 21: mod_base = OTHER; note = 2'-O-methylguanosine-3'-phosphorothioate
  modified_base 22: mod_base = OTHER; note = 2'-O-methylguanosine-3'-phosphorothioate
  modified_base 23: mod_base = OTHER; note = 2'-O-methylguanosine
tagctgcacacgaagcacttggg

SEQ ID NO: 430 - RNA, 23 nt, synthetic construct
  source 1..23: mol_type = other RNA
  modified_base 1: mod_base = OTHER; note = 2'-O-methyluridine-3'-phosphorothioate 5'-(E)-Vinylphosphonate
  modified_base 2: mod_base = OTHER; note = 2'-deoxy-2'-fluoroguanosine-3'-phosphorothioate
  modified_base 3: mod_base = OTHER; note = 2'-O-methylguanosine-3'-phosphate
  modified_base 4: mod_base = OTHER; note = 2'-O-methyladenosine-3'-phosphate
  modified_base 5: mod_base = OTHER; note = 2'-O-methyladenosine-3'-phosphate
  modified_base 6: mod_base = OTHER; note = 2'-deoxy-2'-fluoroadenosine-3'-phosphate
  modified_base 7: mod_base = OTHER; note = 2'-O-methylguanosine-3'-phosphate
  modified_base 8: mod_base = OTHER; note = 2'-deoxy-2'-fluoroguanosine-3'-phosphate
  modified_base 9: mod_base = OTHER; note = 2'-deoxy-2'-fluorocytidine-3'-phosphate
  modified_base 10: mod_base = OTHER; note = 2'-O-methyluridine-3'-phosphate
  modified_base 11: mod_base = OTHER; note = 2'-O-methyluridine-3'-phosphate
  modified_base 12: mod_base = OTHER; note = 2'-O-methylcytidine-3'-phosphate
  modified_base 13: mod_base = OTHER; note = 2'-O-methylcytidine-3'-phosphate
  modified_base 14: mod_base = OTHER; note = 2'-deoxy-2'-fluorouridine-3'-phosphate
  modified_base 15: mod_base = OTHER; note = 2'-O-methylguanosine-3'-phosphate
  modified_base 16: mod_base = OTHER; note = 2'-deoxy-2'-fluorocytidine-3'-phosphate
  modified_base 17: mod_base = OTHER; note = 2'-O-methyladenosine-3'-phosphate
  modified_base 18: mod_base = OTHER; note = 2'-O-methylcytidine-3'-phosphate
  modified_base 19: mod_base = OTHER; note = 2'-O-methyladenosine-3'-phosphate
  modified_base 20: mod_base = OTHER; note = 2'-O-methyladenosine-3'-phosphate
  modified_base 21: mod_base = OTHER; note = 2'-O-methylguanosine-3'-phosphorothioate
  modified_base 22: mod_base = OTHER; note = 2'-O-methylcytidine-3'-phosphorothioate
  modified_base 23: mod_base = OTHER; note = 2'-O-methyluridine
tggaaaggcttcctgcacaagct

SEQ ID NO: 431 - RNA, 23 nt, synthetic construct
  source 1..23: mol_type = other RNA
  modified_base 1: mod_base = OTHER; note = 2'-O-methyluridine-3'-phosphorothioate 5'-(E)-Vinylphosphonate
  modified_base 2: mod_base = OTHER; note = 2'-deoxy-2'-fluoroadenosine-3'-phosphorothioate
  modified_base 3: mod_base = OTHER; note = 2'-O-methylguanosine-3'-phosphate
  modified_base 4: mod_base = OTHER; note = 2'-O-methylguanosine-3'-phosphate
  modified_base 5: mod_base = OTHER; note = 2'-O-methyluridine-3'-phosphate
  modified_base 6: mod_base = OTHER; note = 2'-deoxy-2'-fluorocytidine-3'-phosphate
  modified_base 7: mod_base = OTHER; note = 2'-O-methyladenosine-3'-phosphate
  modified_base 8: mod_base = OTHER; note = 2'-deoxy-2'-fluorocytidine-3'-phosphate
  modified_base 9: mod_base = OTHER; note = 2'-deoxy-2'-fluorocytidine-3'-phosphate
  modified_base 10: mod_base = OTHER; note = 2'-O-methyluridine-3'-phosphate
  modified_base 11: mod_base = OTHER; note = 2'-O-methyluridine-3'-phosphate
  modified_base 12: mod_base = OTHER; note = 2'-O-methylguanosine-3'-phosphate
  modified_base 13: mod_base = OTHER; note = 2'-O-methyluridine-3'-phosphate
  modified_base 14: mod_base = OTHER; note = 2'-deoxy-2'-fluorocytidine-3'-phosphate
  modified_base 15: mod_base = OTHER; note = 2'-O-methyluridine-3'-phosphate
  modified_base 16: mod_base = OTHER; note = 2'-deoxy-2'-fluorocytidine-3'-phosphate
  modified_base 17: mod_base = OTHER; note = 2'-O-methylcytidine-3'-phosphate
  modified_base 18: mod_base = OTHER; note = 2'-O-methyladenosine-3'-phosphate
  modified_base 19: mod_base = OTHER; note = 2'-O-methyladenosine-3'-phosphate
  modified_base 20: mod_base = OTHER; note = 2'-O-methyluridine-3'-phosphate
  modified_base 21: mod_base = OTHER; note = 2'-O-methylguanosine-3'-phosphorothioate
  modified_base 22: mod_base = OTHER; note = 2'-O-methylguanosine-3'-phosphorothioate
  modified_base 23: mod_base = OTHER; note = 2'-O-methylguanosine
taggtcaccttgtctccaatggg

SEQ ID NO: 432 - RNA, 23 nt, synthetic construct
  source 1..23: mol_type = other RNA
  modified_base 1: mod_base = OTHER; note = 2'-O-methyluridine-3'-phosphorothioate 5'-(E)-Vinylphosphonate
  modified_base 2: mod_base = OTHER; note = 2'-deoxy-2'-fluoroadenosine-3'-phosphorothioate
  modified_base 3: mod_base = OTHER; note = 2'-O-methyluridine-3'-phosphate
  modified_base 4: mod_base = OTHER; note = 2'-O-methyluridine-3'-phosphate
  modified_base 5: mod_base = OTHER; note = 2'-O-methylcytidine-3'-phosphate
  modified_base 6: mod_base = OTHER; note = 2'-deoxy-2'-fluorouridine-3'-phosphate
  modified_base 7: mod_base = OTHER; note = 2'-O-methyluridine-3'-phosphate
  modified_base 8: mod_base = OTHER; note = 2'-deoxy-2'-fluorouridine-3'-phosphate
  modified_base 9: mod_base = OTHER; note = 2'-deoxy-2'-fluoroadenosine-3'-phosphate
  modified_base 10: mod_base = OTHER; note = 2'-O-methylcytidine-3'-phosphate
  modified_base 11: mod_base = OTHER; note = 2'-O-methylcytidine-3'-phosphate
  modified_base 12: mod_base = OTHER; note = 2'-O-methylguanosine-3'-phosphate
  modified_base 13: mod_base = OTHER; note = 2'-O-methylcytidine-3'-phosphate
  modified_base 14: mod_base = OTHER; note = 2'-deoxy-2'-fluorouridine-3'-phosphate
  modified_base 15: mod_base = OTHER; note = 2'-O-methylguanosine-3'-phosphate
  modified_base 16: mod_base = OTHER; note = 2'-deoxy-2'-fluoroadenosine-3'-phosphate
  modified_base 17: mod_base = OTHER; note = 2'-O-methyladenosine-3'-phosphate
  modified_base 18: mod_base = OTHER; note = 2'-O-methylguanosine-3'-phosphate
  modified_base 19: mod_base = OTHER; note = 2'-O-methylguanosine-3'-phosphate
  modified_base 20: mod_base = OTHER; note = 2'-O-methyluridine-3'-phosphate
  modified_base 21: mod_base = OTHER; note = 2'-O-methylcytidine-3'-phosphorothioate
  modified_base 22: mod_base = OTHER; note = 2'-O-methyladenosine-3'-phosphorothioate
  modified_base 23: mod_base = OTHER; note = 2'-O-methylcytidine
tattctttaccgctgaaggtcac

SEQ ID NO: 433 - RNA, 23 nt, synthetic construct
  source 1..23: mol_type = other RNA
  modified_base 1: mod_base = OTHER; note = 2'-O-methyluridine-3'-phosphorothioate 5'-(E)-Vinylphosphonate
  modified_base 2: mod_base = OTHER; note = 2'-deoxy-2'-fluoroadenosine-3'-phosphorothioate
  modified_base 3: mod_base = OTHER; note = 2'-O-methylcytidine-3'-phosphate
  modified_base 4: mod_base = OTHER; note = 2'-O-methylguanosine-3'-phosphate
  modified_base 5: mod_base = OTHER; note = 2'-O-methyluridine-3'-phosphate
  modified_base 6: mod_base = OTHER; note = 2'-deoxy-2'-fluorouridine-3'-phosphate
  modified_base 7: mod_base = OTHER; note = 2'-O-methyluridine-3'-phosphate
  modified_base 8: mod_base = OTHER; note = 2'-deoxy-2'-fluoroguanosine-3'-phosphate
  modified_base 9: mod_base = OTHER; note = 2'-deoxy-2'-fluoroguanosine-3'-phosphate
  modified_base 10: mod_base = OTHER; note = 2'-O-methylcytidine-3'-phosphate
  modified_base 11: mod_base = OTHER; note = 2'-O-methyladenosine-3'-phosphate
  modified_base 12: mod_base = OTHER; note = 2'-O-methylcytidine-3'-phosphate
  modified_base 13: mod_base = OTHER; note = 2'-O-methyladenosine-3'-phosphate
  modified_base 14: mod_base = OTHER; note = 2'-deoxy-2'-fluorocytidine-3'-phosphate
  modified_base 15: mod_base = OTHER; note = 2'-O-methyladenosine-3'-phosphate
  modified_base 16: mod_base = OTHER; note = 2'-deoxy-2'-fluorocytidine-3'-phosphate
  modified_base 17: mod_base = OTHER; note = 2'-O-methyladenosine-3'-phosphate
  modified_base 18: mod_base = OTHER; note = 2'-O-methyluridine-3'-phosphate
  modified_base 19: mod_base = OTHER; note = 2'-O-methyluridine-3'-phosphate
  modified_base 20: mod_base = OTHER; note = 2'-O-methylcytidine-3'-phosphate
  modified_base 21: mod_base = OTHER; note = 2'-O-methyluridine-3'-phosphorothioate
  modified_base 22: mod_base = OTHER; note = 2'-O-methyluridine-3'-phosphorothioate
  modified_base 23: mod_base = OTHER; note = 2'-O-methyluridine
tacgtttggcacacacattcttt

SEQ ID NO: 434 - RNA, 23 nt, synthetic construct
  source 1..23: mol_type = other RNA
  modified_base 1: mod_base = OTHER; note = 2'-O-methyluridine-3'-phosphorothioate 5'-(E)-Vinylphosphonate
  modified_base 2: mod_base = OTHER; note = 2'-deoxy-2'-fluorouridine-3'-phosphorothioate
  modified_base 3: mod_base = OTHER; note = 2'-O-methylcytidine-3'-phosphate
  modified_base 4: mod_base = OTHER; note = 2'-O-methyluridine-3'-phosphate
  modified_base 5: mod_base = OTHER; note = 2'-O-methyluridine-3'-phosphate
  modified_base 6: mod_base = OTHER; note = 2'-deoxy-2'-fluoroguanosine-3'-phosphate
  modified_base 7: mod_base = OTHER; note = 2'-O-methyladenosine-3'-phosphate
  modified_base 8: mod_base = OTHER; note = 2'-deoxy-2'-fluorouridine-3'-phosphate
  modified_base 9: mod_base = OTHER; note = 2'-deoxy-2'-fluoroguanosine-3'-phosphate
  modified_base 10: mod_base = OTHER; note = 2'-O-methylguanosine-3'-phosphate
  modified_base 11: mod_base = OTHER; note = 2'-O-methylguanosine-3'-phosphate
  modified_base 12: mod_base = OTHER; note = 2'-O-methylcytidine-3'-phosphate
  modified_base 13: mod_base = OTHER; note = 2'-O-methyluridine-3'-phosphate
  modified_base 14: mod_base = OTHER; note = 2'-deoxy-2'-fluorouridine-3'-phosphate
  modified_base 15: mod_base = OTHER; note = 2'-O-methyladenosine-3'-phosphate
  modified_base 16: mod_base = OTHER; note = 2'-deoxy-2'-fluorocytidine-3'-phosphate
  modified_base 17: mod_base = OTHER; note = 2'-O-methyluridine-3'-phosphate
  modified_base 18: mod_base = OTHER; note = 2'-O-methylguanosine-3'-phosphate
  modified_base 19: mod_base = OTHER; note = 2'-O-methylcytidine-3'-phosphate
  modified_base 20: mod_base = OTHER; note = 2'-O-methyluridine-3'-phosphate
  modified_base 21: mod_base = OTHER; note = 2'-O-methylguanosine-3'-phosphorothioate
  modified_base 22: mod_base = OTHER; note = 2'-O-methylguanosine-3'-phosphorothioate
  modified_base 23: mod_base = OTHER; note = 2'-O-methylcytidine
ttcttgatgggcttactgctggc

SEQ ID NO: 435 - RNA, 23 nt, synthetic construct
  source 1..23: mol_type = other RNA
  modified_base 1: mod_base = OTHER; note = 2'-O-methyluridine-3'-phosphorothioate 5'-(E)-Vinylphosphonate
  modified_base 2: mod_base = OTHER; note = 2'-deoxy-2'-fluoroadenosine-3'-phosphorothioate
  modified_base 3: mod_base = OTHER; note = 2'-O-methylguanosine-3'-phosphate
  modified_base 4: mod_base = OTHER; note = 2'-O-methylguanosine-3'-phosphate
  modified_base 5: mod_base = OTHER; note = 2'-O-methyluridine-3'-phosphate
  modified_base 6: mod_base = OTHER; note = 2'-deoxy-2'-fluorocytidine-3'-phosphate
  modified_base 7: mod_base = OTHER; note = 2'-O-methyluridine-3'-phosphate
  modified_base 8: mod_base = OTHER; note = 2'-deoxy-2'-fluoroguanosine-3'-phosphate
  modified_base 9: mod_base = OTHER; note = 2'-deoxy-2'-fluoroguanosine-3'-phosphate
  modified_base 10: mod_base = OTHER; note = 2'-O-methylcytidine-3'-phosphate
  modified_base 11: mod_base = OTHER; note = 2'-O-methyladenosine-3'-phosphate
  modified_base 12: mod_base = OTHER; note = 2'-O-methylcytidine-3'-phosphate
  modified_base 13: mod_base = OTHER; note = 2'-O-methyluridine-3'-phosphate
  modified_base 14: mod_base = OTHER; note = 2'-deoxy-2'-fluorouridine-3'-phosphate
  modified_base 15: mod_base = OTHER; note = 2'-O-methylguanosine-3'-phosphate
  modified_base 16: mod_base = OTHER; note = 2'-deoxy-2'-fluoroadenosine-3'-phosphate
  modified_base 17: mod_base = OTHER; note = 2'-O-methyladenosine-3'-phosphate
  modified_base 18: mod_base = OTHER; note = 2'-O-methylguanosine-3'-phosphate
  modified_base 19: mod_base = OTHER; note = 2'-O-methylcytidine-3'-phosphate
  modified_base 20: mod_base = OTHER; note = 2'-O-methyladenosine-3'-phosphate
  modified_base 21: mod_base = OTHER; note = 2'-O-methylguanosine-3'-phosphorothioate
  modified_base 22: mod_base = OTHER; note = 2'-O-methylcytidine-3'-phosphorothioate
  modified_base 23: mod_base = OTHER; note = 2'-O-methyluridine
taggtctggcacttgaagcagct

SEQ ID NO: 436 - RNA, 23 nt, synthetic construct
  source 1..23: mol_type = other RNA
  modified_base 1: mod_base = OTHER; note = 2'-O-methyluridine-3'-phosphorothioate 5'-(E)-Vinylphosphonate
  modified_base 2: mod_base = OTHER; note = 2'-deoxy-2'-fluorouridine-3'-phosphorothioate
  modified_base 3: mod_base = OTHER; note = 2'-O-methylcytidine-3'-phosphate
  modified_base 4: mod_base = OTHER; note = 2'-O-methyladenosine-3'-phosphate
  modified_base 5: mod_base = OTHER; note = 2'-O-methylcytidine-3'-phosphate
  modified_base 6: mod_base = OTHER; note = 2'-deoxy-2'-fluoroadenosine-3'-phosphate
  modified_base 7: mod_base = OTHER; note = 2'-O-methylguanosine-3'-phosphate
  modified_base 8: mod_base = OTHER; note = 2'-deoxy-2'-fluorouridine-3'-phosphate
  modified_base 9: mod_base = OTHER; note = 2'-deoxy-2'-fluoroadenosine-3'-phosphate
  modified_base 10: mod_base = OTHER; note = 2'-O-methyluridine-3'-phosphate
  modified_base 11: mod_base = OTHER; note = 2'-O-methylguanosine-3'-phosphate
  modified_base 12: mod_base = OTHER; note = 2'-O-methylguanosine-3'-phosphate
  modified_base 13: mod_base = OTHER; note = 2'-O-methyladenosine-3'-phosphate
  modified_base 14: mod_base = OTHER; note = 2'-deoxy-2'-fluoroadenosine-3'-phosphate
  modified_base 15: mod_base = OTHER; note = 2'-O-methylcytidine-3'-phosphate
  modified_base 16: mod_base = OTHER; note = 2'-deoxy-2'-fluoroadenosine-3'-phosphate
  modified_base 17: mod_base = OTHER; note = 2'-O-methylcytidine-3'-phosphate
  modified_base 18: mod_base = OTHER; note = 2'-O-methylcytidine-3'-phosphate
  modified_base 19: mod_base = OTHER; note = 2'-O-methyladenosine-3'-phosphate
  modified_base 20: mod_base = OTHER; note = 2'-O-methyluridine-3'-phosphate
  modified_base 21: mod_base = OTHER; note = 2'-O-methylcytidine-3'-phosphorothioate
  modified_base 22: mod_base = OTHER; note = 2'-O-methylcytidine-3'-phosphorothioate
  modified_base 23: mod_base = OTHER; note = 2'-O-methyluridine
ttcacagtatggaacaccatcct

SEQ ID NO: 437 - RNA, 23 nt, synthetic construct
  source 1..23: mol_type = other RNA
  modified_base 1: mod_base = OTHER; note = 2'-O-methyluridine-3'-phosphorothioate 5'-(E)-Vinylphosphonate
  modified_base 2: mod_base = OTHER; note = 2'-deoxy-2'-fluoroadenosine-3'-phosphorothioate
  modified_base 3: mod_base = OTHER; note = 2'-O-methyladenosine-3'-phosphate
  modified_base 4: mod_base = OTHER; note = 2'-O-methylguanosine-3'-phosphate
  modified_base 5: mod_base = OTHER; note = 2'-O-methyluridine-3'-phosphate
  modified_base 6: mod_base = OTHER; note = 2'-deoxy-2'-fluorocytidine-3'-phosphate
  modified_base 7: mod_base = OTHER; note = 2'-O-methyluridine-3'-phosphate
  modified_base 8: mod_base = OTHER; note = 2'-deoxy-2'-fluorocytidine-3'-phosphate
  modified_base 9: mod_base = OTHER; note = 2'-deoxy-2'-fluoroadenosine-3'-phosphate
  modified_base 10: mod_base = OTHER; note = 2'-O-methylcytidine-3'-phosphate
  modified_base 11: mod_base = OTHER; note = 2'-O-methyladenosine-3'-phosphate
  modified_base 12: mod_base = OTHER; note = 2'-O-methyluridine-3'-phosphate
  modified_base 13: mod_base = OTHER; note = 2'-O-methyluridine-3'-phosphate
  modified_base 14: mod_base = OTHER; note = 2'-deoxy-2'-fluorouridine-3'-phosphate
  modified_base 15: mod_base = OTHER; note = 2'-O-methyladenosine-3'-phosphate
  modified_base 16: mod_base = OTHER; note = 2'-deoxy-2'-fluoroadenosine-3'-phosphate
  modified_base 17: mod_base = OTHER; note = 2'-O-methyluridine-3'-phosphate
  modified_base 18: mod_base = OTHER; note = 2'-O-methylguanosine-3'-phosphate
  modified_base 19: mod_base = OTHER; note = 2'-O-methylcytidine-3'-phosphate
  modified_base 20: mod_base = OTHER; note = 2'-O-methylcytidine-3'-phosphate
  modified_base 21: mod_base = OTHER; note = 2'-O-methyladenosine-3'-phosphorothioate
  modified_base 22: mod_base = OTHER; note = 2'-O-methyladenosine-3'-phosphorothioate
  modified_base 23: mod_base = OTHER; note = 2'-O-methyladenosine
taagtctcacatttaatgccaaa

SEQ ID NO: 438 - RNA, 23 nt, synthetic construct
  source 1..23: mol_type = other RNA
  modified_base 1: mod_base = OTHER; note = 2'-O-methyluridine-3'-phosphorothioate 5'-(E)-Vinylphosphonate
  modified_base 2: mod_base = OTHER; note = 2'-deoxy-2'-fluorocytidine-3'-phosphorothioate
  modified_base 3: mod_base = OTHER; note = 2'-O-methyladenosine-3'-phosphate
  modified_base 4: mod_base = OTHER; note = 2'-O-methylcytidine-3'-phosphate
  modified_base 5: mod_base = OTHER; note = 2'-O-methyluridine-3'-phosphate
  modified_base 6: mod_base = OTHER; note = 2'-deoxy-2'-fluoroguanosine-3'-phosphate
  modified_base 7: mod_base = OTHER; note = 2'-O-methyladenosine-3'-phosphate
  modified_base 8: mod_base = OTHER; note = 2'-deoxy-2'-fluorouridine-3'-phosphate
  modified_base 9: mod_base = OTHER; note = 2'-deoxy-2'-fluoroguanosine-3'-phosphate
  modified_base 10: mod_base = OTHER; note = 2'-O-methyluridine-3'-phosphate
  modified_base 11: mod_base = OTHER; note = 2'-O-methyladenosine-3'-phosphate
  modified_base 12: mod_base = OTHER; note = 2'-O-methyluridine-3'-phosphate
  modified_base 13: mod_base = OTHER; note = 2'-O-methylcytidine-3'-phosphate
  modified_base 14: mod_base = OTHER; note = 2'-deoxy-2'-fluoroguanosine-3'-phosphate
  modified_base 15: mod_base = OTHER; note = 2'-O-methylguanosine-3'-phosphate
  modified_base 16: mod_base = OTHER; note = 2'-deoxy-2'-fluorouridine-3'-phosphate
  modified_base 17: mod_base = OTHER; note = 2'-O-methylcytidine-3'-phosphate
  modified_base 18: mod_base = OTHER; note = 2'-O-methyladenosine-3'-phosphate
  modified_base 19: mod_base = OTHER; note = 2'-O-methylcytidine-3'-phosphate
  modified_base 20: mod_base = OTHER; note = 2'-O-methyladenosine-3'-phosphate
  modified_base 21: mod_base = OTHER; note = 2'-O-methyladenosine-3'-phosphorothioate
  modified_base 22: mod_base = OTHER; note = 2'-O-methylguanosine-3'-phosphorothioate
  modified_base 23: mod_base = OTHER; note = 2'-O-methyluridine
tcactgatgtatcggtcacaagt

SEQ ID NO: 439 - RNA, 23 nt, synthetic construct
  source 1..23: mol_type = other RNA
  modified_base 1: mod_base = OTHER; note = 2'-O-methyluridine-3'-phosphorothioate 5'-(E)-Vinylphosphonate
  modified_base 2: mod_base = OTHER; note = 2'-deoxy-2'-fluorocytidine-3'-phosphorothioate
  modified_base 3: mod_base = OTHER; note = 2'-O-methyluridine-3'-phosphate
  modified_base 4: mod_base = OTHER; note = 2'-O-methyluridine-3'-phosphate
  modified_base 5: mod_base = OTHER; note = 2'-O-methylcytidine-3'-phosphate
  modified_base 6: mod_base = OTHER; note = 2'-deoxy-2'-fluoroguanosine-3'-phosphate
  modified_base 7: mod_base = OTHER; note = 2'-O-methylguanosine-3'-phosphate
  modified_base 8: mod_base = OTHER; note = 2'-deoxy-2'-fluorouridine-3'-phosphate
  modified_base 9: mod_base = OTHER; note = 2'-deoxy-2'-fluoroguanosine-3'-phosphate
  modified_base 10: mod_base = OTHER; note = 2'-O-methyladenosine-3'-phosphate
  modified_base 11: mod_base = OTHER; note = 2'-O-methyladenosine-3'-phosphate
  modified_base 12: mod_base = OTHER; note = 2'-O-methylcytidine-3'-phosphate
  modified_base 13: mod_base = OTHER; note = 2'-O-methyladenosine-3'-phosphate
  modified_base 14: mod_base = OTHER; note = 2'-deoxy-2'-fluorouridine-3'-phosphate
  modified_base 15: mod_base = OTHER; note = 2'-O-methylcytidine-3'-phosphate
  modified_base 16: mod_base = OTHER; note = 2'-deoxy-2'-fluorouridine-3'-phosphate
  modified_base 17: mod_base = OTHER; note = 2'-O-methylguanosine-3'-phosphate
  modified_base 18: mod_base = OTHER; note = 2'-O-methylguanosine-3'-phosphate
  modified_base 19: mod_base = OTHER; note = 2'-O-methyluridine-3'-phosphate
  modified_base 20: mod_base = OTHER; note = 2'-O-methylguanosine-3'-phosphate
  modified_base 21: mod_base = OTHER; note = 2'-O-methylguanosine-3'-phosphorothioate
  modified_base 22: mod_base = OTHER; note = 2'-O-methylcytidine-3'-phosphorothioate
  modified_base 23: mod_base = OTHER; note = 2'-O-methyladenosine
tcttcggtgaacatctggtggca

SEQ ID NO: 440 - RNA, 23 nt, synthetic construct
  source 1..23: mol_type = other RNA
  modified_base 1: mod_base = OTHER; note = 2'-O-methyluridine-3'-phosphorothioate 5'-(E)-Vinylphosphonate
  modified_base 2: mod_base = OTHER; note = 2'-deoxy-2'-fluorouridine-3'-phosphorothioate
  modified_base 3: mod_base = OTHER; note = 2'-O-methylguanosine-3'-phosphate
  modified_base 4: mod_base = OTHER; note = 2'-O-methyluridine-3'-phosphate
  modified_base 5: mod_base = OTHER; note = 2'-O-methylguanosine-3'-phosphate
  modified_base 6: mod_base = OTHER; note = 2'-deoxy-2'-fluoroadenosine-3'-phosphate
  modified_base 7: mod_base = OTHER; note = 2'-O-methylguanosine-3'-phosphate
  modified_base 8: mod_base = OTHER; note = 2'-deoxy-2'-fluoroguanosine-3'-phosphate
  modified_base 9: mod_base = OTHER; note = 2'-deoxy-2'-fluorouridine-3'-phosphate
  modified_base 10: mod_base = OTHER; note = 2'-O-methyladenosine-3'-phosphate
  modified_base 11: mod_base = OTHER; note = 2'-O-methylcytidine-3'-phosphate
  modified_base 12: mod_base = OTHER; note = 2'-O-methyladenosine-3'-phosphate
  modified_base 13: mod_base = OTHER; note = 2'-O-methyluridine-3'-phosphate
  modified_base 14: mod_base = OTHER; note = 2'-deoxy-2'-fluorouridine-3'-phosphate
  modified_base 15: mod_base = OTHER; note = 2'-O-methyluridine-3'-phosphate
  modified_base 16: mod_base = OTHER; note = 2'-deoxy-2'-fluorocytidine-3'-phosphate
  modified_base 17: mod_base = OTHER; note = 2'-O-methylcytidine-3'-phosphate
  modified_base 18: mod_base = OTHER; note = 2'-O-methyluridine-3'-phosphate
  modified_base 19: mod_base = OTHER; note = 2'-O-methylcytidine-3'-phosphate
  modified_base 20: mod_base = OTHER; note = 2'-O-methyluridine-3'-phosphate
  modified_base 21: mod_base = OTHER; note = 2'-O-methylcytidine-3'-phosphorothioate
  modified_base 22: mod_base = OTHER; note = 2'-O-methylcytidine-3'-phosphorothioate
  modified_base 23: mod_base = OTHER; note = 2'-O-methyluridine
ttgtgaggtacatttcctctcct

SEQ ID NO: 441 - RNA, 23 nt, synthetic construct
  source 1..23: mol_type = other RNA
  modified_base 1: mod_base = OTHER; note = 2'-O-methyluridine-3'-phosphorothioate 5'-(E)-Vinylphosphonate
  modified_base 2: mod_base = OTHER; note = 2'-deoxy-2'-fluorocytidine-3'-phosphorothioate
  modified_base 3: mod_base = OTHER; note = 2'-O-methylcytidine-3'-phosphate
  modified_base 4: mod_base = OTHER; note = 2'-O-methyladenosine-3'-phosphate
  modified_base 5: mod_base = OTHER; note = 2'-O-methyladenosine-3'-phosphate
  modified_base 6: mod_base = OTHER; note = 2'-deoxy-2'-fluoroadenosine-3'-phosphate
  modified_base 7: mod_base = OTHER; note = 2'-O-methylcytidine-3'-phosphate
  modified_base 8: mod_base = OTHER; note = 2'-deoxy-2'-fluorocytidine-3'-phosphate
  modified_base 9: mod_base = OTHER; note = 2'-deoxy-2'-fluorouridine-3'-phosphate
  modified_base 10: mod_base = OTHER; note = 2'-O-methylcytidine-3'-phosphate
  modified_base 11: mod_base = OTHER; note = 2'-O-methylguanosine-3'-phosphate
  modified_base 12: mod_base = OTHER; note = 2'-O-methylguanosine-3'-phosphate
  modified_base 13: mod_base = OTHER; note = 2'-O-methyladenosine-3'-phosphate
  modified_base 14: mod_base = OTHER; note = 2'-deoxy-2'-fluoroadenosine-3'-phosphate
  modified_base 15: mod_base = OTHER; note = 2'-O-methylcytidine-3'-phosphate
  modified_base 16: mod_base = OTHER; note = 2'-deoxy-2'-fluorocytidine-3'-phosphate
  modified_base 17: mod_base = OTHER; note = 2'-O-methyluridine-3'-phosphate
  modified_base 18: mod_base = OTHER; note = 2'-O-methylguanosine-3'-phosphate
  modified_base 19: mod_base = OTHER; note = 2'-O-methyluridine-3'-phosphate
  modified_base 20: mod_base = OTHER; note = 2'-O-methylguanosine-3'-phosphate
  modified_base 21: mod_base = OTHER; note = 2'-O-methyladenosine-3'-phosphorothioate
  modified_base 22: mod_base = OTHER; note = 2'-O-methylguanosine-3'-phosphorothioate
  modified_base 23: mod_base = OTHER; note = 2'-O-methylguanosine
tccaaacctcggaacctgtgagg

SEQ ID NO: 442 - RNA, 23 nt, synthetic construct
  source 1..23: mol_type = other RNA
  modified_base 1: mod_base = OTHER; note = 2'-O-methyluridine-3'-phosphorothioate 5'-(E)-Vinylphosphonate
  modified_base 2: mod_base = OTHER; note = 2'-deoxy-2'-fluoroadenosine-3'-phosphorothioate
  modified_base 3: mod_base = OTHER; note = 2'-O-methylguanosine-3'-phosphate
  modified_base 4: mod_base = OTHER; note = 2'-O-methyladenosine-3'-phosphate
  modified_base 5: mod_base = OTHER; note = 2'-O-methyluridine-3'-phosphate
  modified_base 6: mod_base = OTHER; note = 2'-deoxy-2'-fluoroguanosine-3'-phosphate
  modified_base 7: mod_base = OTHER; note = 2'-O-methyluridine-3'-phosphate
  modified_base 8: mod_base = OTHER; note = 2'-deoxy-2'-fluorocytidine-3'-phosphate
  modified_base 9: mod_base = OTHER; note = 2'-deoxy-2'-fluorocytidine-3'-phosphate
  modified_base 10: mod_base = OTHER; note = 2'-O-methylguanosine-3'-phosphate
  modified_base 11: mod_base = OTHER; note = 2'-O-methyluridine-3'-phosphate
  modified_base 12: mod_base = OTHER; note = 2'-O-methylcytidine-3'-phosphate
  modified_base 13: mod_base = OTHER; note = 2'-O-methyluridine-3'-phosphate
  modified_base 14: mod_base = OTHER; note = 2'-deoxy-2'-fluoroadenosine-3'-phosphate
  modified_base 15: mod_base = OTHER; note = 2'-O-methyluridine-3'-phosphate
  modified_base 16: mod_base = OTHER; note = 2'-deoxy-2'-fluoroguanosine-3'-phosphate
  modified_base 17: mod_base = OTHER; note = 2'-O-methylcytidine-3'-phosphate
  modified_base 18: mod_base = OTHER; note = 2'-O-methyluridine-3'-phosphate
  modified_base 19: mod_base = OTHER; note = 2'-O-methyluridine-3'-phosphate
  modified_base 20: mod_base = OTHER; note = 2'-O-methyluridine-3'-phosphate
  modified_base 21: mod_base = OTHER; note = 2'-O-methyladenosine-3'-phosphorothioate
  modified_base 22: mod_base = OTHER; note = 2'-O-methyladenosine-3'-phosphorothioate
  modified_base 23: mod_base = OTHER; note = 2'-O-methylcytidine
tagatgtccgtctatgctttaac

SEQ ID NO: 443 - RNA, 23 nt, synthetic construct
  source 1..23: mol_type = other RNA
  modified_base 1: mod_base = OTHER; note = 2'-O-methyluridine-3'-phosphorothioate 5'-(E)-Vinylphosphonate
  modified_base 2: mod_base = OTHER; note = 2'-deoxy-2'-fluorouridine-3'-phosphorothioate
  modified_base 3: mod_base = OTHER; note = 2'-O-methylguanosine-3'-phosphate
  modified_base 4: mod_base = OTHER; note = 2'-O-methyladenosine-3'-phosphate
  modified_base 5: mod_base = OTHER; note = 2'-O-methylguanosine-3'-phosphate
  modified_base 6: mod_base = OTHER; note = 2'-deoxy-2'-fluoroadenosine-3'-phosphate
  modified_base 7: mod_base = OTHER; note = 2'-O-methyluridine-3'-phosphate
  modified_base 8: mod_base = OTHER; note = 2'-deoxy-2'-fluoroguanosine-3'-phosphate
  modified_base 9: mod_base = OTHER; note = 2'-deoxy-2'-fluoroguanosine-3'-phosphate
  modified_base 10: mod_base = OTHER; note = 2'-O-methyladenosine-3'-phosphate
  modified_base 11: mod_base = OTHER; note = 2'-O-methylguanosine-3'-phosphate
  modified_base 12: mod_base = OTHER; note = 2'-O-methylguanosine-3'-phosphate
  modified_base 13: mod_base = OTHER; note = 2'-O-methyluridine-3'-phosphate
  modified_base 14: mod_base = OTHER; note = 2'-deoxy-2'-fluorouridine-3'-phosphate
  modified_base 15: mod_base = OTHER; note = 2'-O-methyluridine-3'-phosphate
  modified_base 16: mod_base = OTHER; note = 2'-deoxy-2'-fluorocytidine-3'-phosphate
  modified_base 17: mod_base = OTHER; note = 2'-O-methyladenosine-3'-phosphate
  modified_base 18: mod_base = OTHER; note = 2'-O-methylguanosine-3'-phosphate
  modified_base 19: mod_base = OTHER; note = 2'-O-methyladenosine-3'-phosphate
  modified_base 20: mod_base = OTHER; note = 2'-O-methyluridine-3'-phosphate
  modified_base 21: mod_base = OTHER; note = 2'-O-methylguanosine-3'-phosphorothioate
  modified_base 22: mod_base = OTHER; note = 2'-O-methyluridine-3'-phosphorothioate
  modified_base 23: mod_base = OTHER; note = 2'-O-methylcytidine
ttgagatggaggtttcagatgtc

SEQ ID NO: 444 - RNA, 23 nt, synthetic construct
  source 1..23: mol_type = other RNA
  modified_base 1: mod_base = OTHER; note = 2'-O-methyluridine-3'-phosphorothioate 5'-(E)-Vinylphosphonate
  modified_base 2: mod_base = OTHER; note = 2'-deoxy-2'-fluoroadenosine-3'-phosphorothioate
  modified_base 3: mod_base = OTHER; note = 2'-O-methylcytidine-3'-phosphate
  modified_base 4: mod_base = OTHER; note = 2'-O-methyluridine-3'-phosphate
  modified_base 5: mod_base = OTHER; note = 2'-O-methyluridine-3'-phosphate
  modified_base 6: mod_base = OTHER; note = 2'-deoxy-2'-fluorouridine-3'-phosphate
  modified_base 7: mod_base = OTHER; note = 2'-O-methyladenosine-3'-phosphate
  modified_base 8: mod_base = OTHER; note = 2'-deoxy-2'-fluoroguanosine-3'-phosphate
  modified_base 9: mod_base = OTHER; note = 2'-deoxy-2'-fluorocytidine-3'-phosphate
  modified_base 10: mod_base = OTHER; note = 2'-O-methylguanosine-3'-phosphate
  modified_base 11: mod_base = OTHER; note = 2'-O-methylcytidine-3'-phosphate
  modified_base 12: mod_base = OTHER; note = 2'-O-methyladenosine-3'-phosphate
  modified_base 13: mod_base = OTHER; note = 2'-O-methylguanosine-3'-phosphate
  modified_base 14: mod_base = OTHER; note = 2'-deoxy-2'-fluoroadenosine-3'-phosphate
  modified_base 15: mod_base = OTHER; note = 2'-O-methyluridine-3'-phosphate
  modified_base 16: mod_base = OTHER; note = 2'-deoxy-2'-fluoroguanosine-3'-phosphate
  modified_base 17: mod_base = OTHER; note = 2'-O-methyladenosine-3'-phosphate
  modified_base 18: mod_base = OTHER; note = 2'-O-methylcytidine-3'-phosphate
  modified_base 19: mod_base = OTHER; note = 2'-O-methyluridine-3'-phosphate
  modified_base 20: mod_base = OTHER; note = 2'-O-methylcytidine-3'-phosphate
  modified_base 21: mod_base = OTHER; note = 2'-O-methylguanosine-3'-phosphorothioate
  modified_base 22: mod_base = OTHER; note = 2'-O-methylguanosine-3'-phosphorothioate
  modified_base 23: mod_base = OTHER; note = 2'-O-methyluridine
tactttagcgcagatgactcggt

SEQ ID NO: 445 - RNA, 23 nt, synthetic construct
  source 1..23: mol_type = other RNA
  modified_base 1: mod_base = OTHER; note = 2'-O-methyluridine-3'-phosphorothioate 5'-(E)-Vinylphosphonate
  modified_base 2: mod_base = OTHER; note = 2'-deoxy-2'-fluorouridine-3'-phosphorothioate
  modified_base 3: mod_base = OTHER; note = 2'-O-methylcytidine-3'-phosphate
  modified_base 4: mod_base = OTHER; note = 2'-O-methyluridine-3'-phosphate
  modified_base 5: mod_base = OTHER; note = 2'-O-methyluridine-3'-phosphate
  modified_base 6: mod_base = OTHER; note = 2'-deoxy-2'-fluorouridine-3'-phosphate
  modified_base 7: mod_base = OTHER; note = 2'-O-methylguanosine-3'-phosphate
  modified_base 8: mod_base = OTHER; note = 2'-deoxy-2'-fluorouridine-3'-phosphate
  modified_base 9: mod_base = OTHER; note = 2'-deoxy-2'-fluoroadenosine-3'-phosphate
  modified_base 10: mod_base = OTHER; note = 2'-O-methyladenosine-3'-phosphate
  modified_base 11: mod_base = OTHER; note = 2'-O-methyluridine-3'-phosphate
  modified_base 12: mod_base = OTHER; note = 2'-O-methyluridine-3'-phosphate
  modified_base 13: mod_base = OTHER; note = 2'-O-methyladenosine-3'-phosphate
  modified_base 14: mod_base = OTHER; note = 2'-deoxy-2'-fluoroadenosine-3'-phosphate
  modified_base 15: mod_base = OTHER; note = 2'-O-methylguanosine-3'-phosphate
  modified_base 16: mod_base = OTHER; note = 2'-deoxy-2'-fluoroguanosine-3'-phosphate
  modified_base 17: mod_base = OTHER; note = 2'-O-methyladenosine-3'-phosphate
  modified_base 18: mod_base = OTHER; note = 2'-O-methyluridine-3'-phosphate
  modified_base 19: mod_base = OTHER; note = 2'-O-methylcytidine-3'-phosphate
  modified_base 20: mod_base = OTHER; note = 2'-O-methyluridine-3'-phosphate
  modified_base 21: mod_base = OTHER; note = 2'-O-methylcytidine-3'-phosphorothioate
  modified_base 22: mod_base = OTHER; note = 2'-O-methyladenosine-3'-phosphorothioate
  modified_base 23: mod_base = OTHER; note = 2'-O-methyluridine
ttctttgtaattaaggatctcat

SEQ ID NO: 446 - RNA, 23 nt, synthetic construct
  source 1..23: mol_type = other RNA
  modified_base 1: mod_base = OTHER; note = 2'-O-methyluridine-3'-phosphorothioate 5'-(E)-Vinylphosphonate
  modified_base 2: mod_base = OTHER; note = 2'-deoxy-2'-fluoroguanosine-3'-phosphorothioate
  modified_base 3: mod_base = OTHER; note = 2'-O-methyluridine-3'-phosphate
  modified_base 4: mod_base = OTHER; note = 2'-O-methyluridine-3'-phosphate
  modified_base 5: mod_base = OTHER; note = 2'-O-methylguanosine-3'-phosphate
  modified_base 6: mod_base = OTHER; note = 2'-deoxy-2'-fluorouridine-3'-phosphate
  modified_base 7: mod_base = OTHER; note = 2'-O-methyladenosine-3'-phosphate
  modified_base 8: mod_base = OTHER; note = 2'-deoxy-2'-fluorocytidine-3'-phosphate
  modified_base 9: mod_base = OTHER; note = 2'-deoxy-2'-fluorocytidine-3'-phosphate
  modified_base 10: mod_base = OTHER; note = 2'-O-methyluridine-3'-phosphate
  modified_base 11: mod_base = OTHER; note = 2'-O-methylcytidine-3'-phosphate
  modified_base 12: mod_base = OTHER; note = 2'-O-methylguanosine-3'-phosphate
  modified_base 13: mod_base = OTHER; note = 2'-O-methyluridine-3'-phosphate
  modified_base 14: mod_base = OTHER; note = 2'-deoxy-2'-fluoroadenosine-3'-phosphate
  modified_base 15: mod_base = OTHER; note = 2'-O-methylguanosine-3'-phosphate
  modified_base 16: mod_base = OTHER; note = 2'-deoxy-2'-fluoroadenosine-3'-phosphate
  modified_base 17: mod_base = OTHER; note = 2'-O-methyluridine-3'-phosphate
  modified_base 18: mod_base = OTHER; note = 2'-O-methyladenosine-3'-phosphate
  modified_base 19: mod_base = OTHER; note = 2'-O-methylguanosine-3'-phosphate
  modified_base 20: mod_base = OTHER; note = 2'-O-methyladenosine-3'-phosphate
  modified_base 21: mod_base = OTHER; note = 2'-O-methylcytidine-3'-phosphorothioate
  modified_base 22: mod_base = OTHER; note = 2'-O-methyluridine-3'-phosphorothioate
  modified_base 23: mod_base = OTHER; note = 2'-O-methyluridine
tgttgtacctcgtagatagactt

SEQ ID NO: 447 - RNA, 23 nt, synthetic construct
  source 1..23: mol_type = other RNA
  modified_base 1: mod_base = OTHER; note = 2'-O-methyluridine-3'-phosphorothioate 5'-(E)-Vinylphosphonate
  modified_base 2: mod_base = OTHER; note = 2'-deoxy-2'-fluoroguanosine-3'-phosphorothioate
  modified_base 3: mod_base = OTHER; note = 2'-O-methyladenosine-3'-phosphate
  modified_base 4: mod_base = OTHER; note = 2'-O-methyladenosine-3'-phosphate
  modified_base 5: mod_base = OTHER; note = 2'-O-methyluridine-3'-phosphate
  modified_base 6: mod_base = OTHER; note = 2'-deoxy-2'-fluoroguanosine-3'-phosphate
  modified_base 7: mod_base = OTHER; note = 2'-O-methyladenosine-3'-phosphate
  modified_base 8: mod_base = OTHER; note = 2'-deoxy-2'-fluoroguanosine-3'-phosphate
  modified_base 9: mod_base = OTHER; note = 2'-deoxy-2'-fluoroguanosine-3'-phosphate
  modified_base 10: mod_base = OTHER; note = 2'-O-methylcytidine-3'-phosphate
  modified_base 11: mod_base = OTHER; note = 2'-O-methyluridine-3'-phosphate
  modified_base 12: mod_base = OTHER; note = 2'-O-methylcytidine-3'-phosphate
  modified_base 13: mod_base = OTHER; note = 2'-O-methyladenosine-3'-phosphate
  modified_base 14: mod_base = OTHER; note = 2'-deoxy-2'-fluorouridine-3'-phosphate
  modified_base 15: mod_base = OTHER; note = 2'-O-methyladenosine-3'-phosphate
  modified_base 16: mod_base = OTHER; note = 2'-deoxy-2'-fluoroguanosine-3'-phosphate
  modified_base 17: mod_base = OTHER; note = 2'-O-methylguanosine-3'-phosphate
  modified_base 18: mod_base = OTHER; note = 2'-O-methyladenosine-3'-phosphate
  modified_base 19: mod_base = OTHER; note = 2'-O-methyladenosine-3'-phosphate
  modified_base 20: mod_base = OTHER; note = 2'-O-methyladenosine-3'-phosphate
  modified_base 21: mod_base = OTHER; note = 2'-O-methyluridine-3'-phosphorothioate
  modified_base 22: mod_base = OTHER; note = 2'-O-methylguanosine-3'-phosphorothioate
  modified_base 23: mod_base = OTHER; note = 2'-O-methyladenosine
tgaatgaggctcataggaaatga

SEQ ID NO: 448 - RNA, 23 nt, synthetic construct
  source 1..23: mol_type = other RNA
  modified_base 1: mod_base = OTHER; note = 2'-O-methyluridine-3'-phosphorothioate 5'-(E)-Vinylphosphonate
  modified_base 2: mod_base = OTHER; note = 2'-deoxy-2'-fluorouridine-3'-phosphorothioate
  modified_base 3: mod_base = OTHER; note = 2'-O-methylcytidine-3'-phosphate
  modified_base 4: mod_base = OTHER; note = 2'-O-methylguanosine-3'-phosphate
  modified_base 5: mod_base = OTHER; note = 2'-O-methylguanosine-3'-phosphate
  modified_base 6: mod_base = OTHER; note = 2'-deoxy-2'-fluoroadenosine-3'-phosphate
  modified_base 7: mod_base = OTHER; note = 2'-O-methylcytidine-3'-phosphate
  modified_base 8: mod_base = OTHER; note = 2'-deoxy-2'-fluoroadenosine-3'-phosphate
  modified_base 9: mod_base = OTHER; note = 2'-deoxy-2'-fluorouridine-3'-phosphate
  modified_base 10: mod_base = OTHER; note = 2'-O-methylguanosine-3'-phosphate
  modified_base 11: mod_base = OTHER; note = 2'-O-methyluridine-3'-phosphate
  modified_base 12: mod_base = OTHER; note = 2'-O-methyladenosine-3'-phosphate
  modified_base 13: mod_base = OTHER; note = 2'-O-methyluridine-3'-phosphate
  modified_base 14: mod_base = OTHER; note = 2'-deoxy-2'-fluorocytidine-3'-phosphate
  modified_base 15: mod_base = OTHER; note = 2'-O-methyluridine-3'-phosphate
  modified_base 16: mod_base = OTHER; note = 2'-deoxy-2'-fluoroguanosine-3'-phosphate
  modified_base 17: mod_base = OTHER; note = 2'-O-methylguanosine-3'-phosphate
  modified_base 18: mod_base = OTHER; note = 2'-O-methyladenosine-3'-phosphate
  modified_base 19: mod_base = OTHER; note = 2'-O-methyladenosine-3'-phosphate
  modified_base 20: mod_base = OTHER; note = 2'-O-methyluridine-3'-phosphate
  modified_base 21: mod_base = OTHER; note = 2'-O-methylguanosine-3'-phosphorothioate
  modified_base 22: mod_base = OTHER; note = 2'-O-methyladenosine-3'-phosphorothioate
  modified_base 23: mod_base = OTHER; note = 2'-O-methylguanosine
ttcggacatgtatctggaatgag

SEQ ID NO: 449 - RNA, 23 nt, synthetic construct
  source 1..23: mol_type = other RNA
  modified_base 1: mod_base = OTHER; note = 2'-O-methyluridine-3'-phosphorothioate 5'-(E)-Vinylphosphonate
  modified_base 2: mod_base = OTHER; note = 2'-deoxy-2'-fluorocytidine-3'-phosphorothioate
  modified_base 3: mod_base = OTHER; note = 2'-O-methyluridine-3'-phosphate
  modified_base 4: mod_base = OTHER; note = 2'-O-methylcytidine-3'-phosphate
  modified_base 5: mod_base = OTHER; note = 2'-O-methyluridine-3'-phosphate
  modified_base 6: mod_base = OTHER; note = 2'-deoxy-2'-fluorocytidine-3'-phosphate
  modified_base 7: mod_base = OTHER; note = 2'-O-methylcytidine-3'-phosphate
  modified_base 8: mod_base = OTHER; note = 2'-deoxy-2'-fluoroadenosine-3'-phosphate
  modified_base 9: mod_base = OTHER; note = 2'-deoxy-2'-fluoroguanosine-3'-phosphate
  modified_base 10: mod_base = OTHER; note = 2'-O-methylcytidine-3'-phosphate
  modified_base 11: mod_base = OTHER; note = 2'-O-methyladenosine-3'-phosphate
  modified_base 12: mod_base = OTHER; note = 2'-O-methyluridine-3'-phosphate
  modified_base 13: mod_base = OTHER; note = 2'-O-methylcytidine-3'-phosphate
  modified_base 14: mod_base = OTHER; note = 2'-deoxy-2'-fluorouridine-3'-phosphate
  modified_base 15: mod_base = OTHER; note = 2'-O-methylcytidine-3'-phosphate
  modified_base 16: mod_base = OTHER; note = 2'-deoxy-2'-fluoroguanosine-3'-phosphate
  modified_base 17: mod_base = OTHER; note = 2'-O-methyluridine-3'-phosphate
  modified_base 18: mod_base = OTHER; note = 2'-O-methylcytidine-3'-phosphate
  modified_base 19: mod_base = OTHER; note = 2'-O-methylguanosine-3'-phosphate
  modified_base 20: mod_base = OTHER; note = 2'-O-methylguanosine-3'-phosphate
  modified_base 21: mod_base = OTHER; note = 2'-O-methyladenosine-3'-phosphorothioate
  modified_base 22: mod_base = OTHER; note = 2'-O-methylcytidine-3'-phosphorothioate
  modified_base 23: mod_base = OTHER; note = 2'-O-methyladenosine
tctctccagcatctcgtcggaca

SEQ ID NO: 450 - RNA, 23 nt, synthetic construct
  source 1..23: mol_type = other RNA
  modified_base 1: mod_base = OTHER; note = 2'-O-methyluridine-3'-phosphorothioate 5'-(E)-Vinylphosphonate
  modified_base 2: mod_base = OTHER; note = 2'-deoxy-2'-fluoroadenosine-3'-phosphorothioate
  modified_base 3: mod_base = OTHER; note = 2'-O-methylguanosine-3'-phosphate
  modified_base 4: mod_base = OTHER; note = 2'-O-methyladenosine-3'-phosphate
  modified_base 5: mod_base = OTHER; note = 2'-O-methyluridine-3'-phosphate
  modified_base 6: mod_base = OTHER; note = 2'-deoxy-2'-fluoroadenosine-3'-phosphate
  modified_base 7: mod_base = OTHER; note = 2'-O-methyladenosine-3'-phosphate
  modified_base 8: mod_base = OTHER; note = 2'-deoxy-2'-fluorouridine-3'-phosphate
  modified_base 9: mod_base = OTHER; note = 2'-deoxy-2'-fluoroguanosine-3'-phosphate
  modified_base 10: mod_base = OTHER; note = 2'-O-methyluridine-3'-phosphate
  modified_base 11: mod_base = OTHER; note = 2'-O-methyluridine-3'-phosphate
  modified_base 12: mod_base = OTHER; note = 2'-O-methylcytidine-3'-phosphate
  modified_base 13: mod_base = OTHER; note = 2'-O-methylcytidine-3'-phosphate
  modified_base 14: mod_base = OTHER; note = 2'-deoxy-2'-fluorocytidine-3'-phosphate
  modified_base 15: mod_base = OTHER; note = 2'-O-methyladenosine-3'-phosphate
  modified_base 16: mod_base = OTHER; note = 2'-deoxy-2'-fluoroguanosine-3'-phosphate
  modified_base 17: mod_base = OTHER; note = 2'-O-methylcytidine-3'-phosphate
  modified_base 18: mod_base = OTHER; note = 2'-O-methylguanosine-3'-phosphate
  modified_base 19: mod_base = OTHER; note = 2'-O-methyladenosine-3'-phosphate
  modified_base 20: mod_base = OTHER; note = 2'-O-methylcytidine-3'-phosphate
  modified_base 21: mod_base = OTHER; note = 2'-O-methyluridine-3'-phosphorothioate
  modified_base 22: mod_base = OTHER; note = 2'-O-methylcytidine-3'-phosphorothioate
  modified_base 23: mod_base = OTHER; note = 2'-O-methyluridine
tagataatgttcccagcgactct

SEQ ID NO: 451 - RNA, 23 nt, synthetic construct
  source 1..23: mol_type = other RNA
  modified_base 1: mod_base = OTHER; note = 2'-O-methyluridine-3'-phosphorothioate 5'-(E)-Vinylphosphonate
  modified_base 2: mod_base = OTHER; note = 2'-deoxy-2'-fluoroadenosine-3'-phosphorothioate
  modified_base 3: mod_base = OTHER; note = 2'-O-methylguanosine-3'-phosphate
  modified_base 4: mod_base = OTHER; note = 2'-O-methylguanosine-3'-phosphate
  modified_base 5: mod_base = OTHER; note = 2'-O-methyluridine-3'-phosphate
  modified_base 6: mod_base = OTHER; note = 2'-deoxy-2'-fluorouridine-3'-phosphate
  modified_base 7: mod_base = OTHER; note = 2'-O-methylcytidine-3'-phosphate
  modified_base 8: mod_base = OTHER; note = 2'-deoxy-2'-fluorouridine-3'-phosphate
  modified_base 9: mod_base = OTHER; note = 2'-deoxy-2'-fluorocytidine-3'-phosphate
  modified_base 10: mod_base = OTHER; note = 2'-O-methylguanosine-3'-phosphate
  modified_base 11: mod_base = OTHER; note = 2'-O-methyluridine-3'-phosphate
  modified_base 12: mod_base = OTHER; note = 2'-O-methyladenosine-3'-phosphate
  modified_base 13: mod_base = OTHER; note = 2'-O-methylguanosine-3'-phosphate
  modified_base 14: mod_base = OTHER; note = 2'-deoxy-2'-fluoroadenosine-3'-phosphate
  modified_base 15: mod_base = OTHER; note = 2'-O-methyluridine-3'-phosphate
  modified_base 16: mod_base = OTHER; note = 2'-deoxy-2'-fluoroguanosine-3'-phosphate
  modified_base 17: mod_base = OTHER; note = 2'-O-methyluridine-3'-phosphate
  modified_base 18: mod_base = OTHER; note = 2'-O-methylcytidine-3'-phosphate
  modified_base 19: mod_base = OTHER; note = 2'-O-methylcytidine-3'-phosphate
  modified_base 20: mod_base = OTHER; note = 2'-O-methyluridine-3'-phosphate
  modified_base 21: mod_base = OTHER; note = 2'-O-methylguanosine-3'-phosphorothioate
  modified_base 22: mod_base = OTHER; note = 2'-O-methylguanosine-3'-phosphorothioate
  modified_base 23: mod_base = OTHER; note = 2'-O-methylguanosine
taggttctcgtagatgtcctggg

SEQ ID NO: 452 - RNA, 23 nt, synthetic construct
  source 1..23: mol_type = other RNA
  modified_base 1: mod_base = OTHER; note = 2'-O-methyluridine-3'-phosphorothioate 5'-(E)-Vinylphosphonate
  modified_base 2: mod_base = OTHER; note = 2'-deoxy-2'-fluorocytidine-3'-phosphorothioate
  modified_base 3: mod_base = OTHER; note = 2'-O-methyladenosine-3'-phosphate
  modified_base 4: mod_base = OTHER; note = 2'-O-methylguanosine-3'-phosphate
  modified_base 5: mod_base = OTHER; note = 2'-O-methyladenosine-3'-phosphate
  modified_base 6: mod_base = OTHER; note = 2'-deoxy-2'-fluoroguanosine-3'-phosphate
  modified_base 7: mod_base = OTHER; note = 2'-O-methylcytidine-3'-phosphate
  modified_base 8: mod_base = OTHER; note = 2'-deoxy-2'-fluoroguanosine-3'-phosphate
  modified_base 9: mod_base = OTHER; note = 2'-deoxy-2'-fluoroguanosine-3'-phosphate
  modified_base 10: mod_base = OTHER; note = 2'-O-methyluridine-3'-phosphate
  modified_base 11: mod_base = OTHER; note = 2'-O-methyladenosine-3'-phosphate
  modified_base 12: mod_base = OTHER; note = 2'-O-methylguanosine-3'-phosphate
  modified_base 13: mod_base = OTHER; note = 2'-O-methyluridine-3'-phosphate
  modified_base 14: mod_base = OTHER; note = 2'-deoxy-2'-fluoroadenosine-3'-phosphate
  modified_base 15: mod_base = OTHER; note = 2'-O-methylguanosine-3'-phosphate
  modified_base 16: mod_base = OTHER; note = 2'-deoxy-2'-fluorouridine-3'-phosphate
  modified_base 17: mod_base = OTHER; note = 2'-O-methylguanosine-3'-phosphate
  modified_base 18: mod_base = OTHER; note = 2'-O-methylguanosine-3'-phosphate
  modified_base 19: mod_base = OTHER; note = 2'-O-methyluridine-3'-phosphate
  modified_base 20: mod_base = OTHER; note = 2'-O-methylguanosine-3'-phosphate
  modified_base 21: mod_base = OTHER; note = 2'-O-methyladenosine-3'-phosphorothioate
  modified_base 22: mod_base = OTHER; note = 2'-O-methylguanosine-3'-phosphorothioate
  modified_base 23: mod_base = OTHER; note = 2'-O-methylguanosine
tcagagcggtagtagtggtgagg

SEQ ID NO: 453 - RNA, 23 nt, synthetic construct
  source 1..23: mol_type = other RNA
  modified_base 1: mod_base = OTHER; note = 2'-O-methyluridine-3'-phosphorothioate 5'-(E)-Vinylphosphonate
  modified_base 2: mod_base = OTHER; note = 2'-deoxy-2'-fluoroadenosine-3'-phosphorothioate
  modified_base 3: mod_base = OTHER; note = 2'-O-methyluridine-3'-phosphate
  modified_base 4: mod_base = OTHER; note = 2'-O-methylcytidine-3'-phosphate
  modified_base 5: mod_base = OTHER; note = 2'-O-methyluridine-3'-phosphate
  modified_base 6: mod_base = OTHER; note = 2'-deoxy-2'-fluoroadenosine-3'-phosphate
  modified_base 7: mod_base = OTHER; note = 2'-O-methyladenosine-3'-phosphate
  modified_base 8: mod_base = OTHER; note = 2'-deoxy-2'-fluorocytidine-3'-phosphate
  modified_base 9: mod_base = OTHER; note = 2'-deoxy-2'-fluorouridine-3'-phosphate
  modified_base 10: mod_base = OTHER; note = 2'-O-methylguanosine-3'-phosphate
  modified_base 11: mod_base = OTHER; note = 2'-O-methylguanosine-3'-phosphate
  modified_base 12: mod_base = OTHER; note = 2'-O-methylcytidine-3'-phosphate
  modified_base 13: mod_base = OTHER; note = 2'-O-methyluridine-3'-phosphate
  modified_base 14: mod_base = OTHER; note = 2'-deoxy-2'-fluoroadenosine-3'-phosphate
  modified_base 15: mod_base = OTHER; note = 2'-O-methyluridine-3'-phosphate
  modified_base 16: mod_base = OTHER; note = 2'-deoxy-2'-fluoroguanosine-3'-phosphate
  modified_base 17: mod_base = OTHER; note = 2'-O-methylguanosine-3'-phosphate
  modified_base 18: mod_base = OTHER; note = 2'-O-methyluridine-3'-phosphate
  modified_base 19: mod_base = OTHER; note = 2'-O-methyladenosine-3'-phosphate
  modified_base 20: mod_base = OTHER; note = 2'-O-methyluridine-3'-phosphate
  modified_base 21: mod_base = OTHER; note = 2'-O-methylguanosine-3'-phosphorothioate
  modified_base 22: mod_base = OTHER; note = 2'-O-methylguanosine-3'-phosphorothioate
  modified_base 23: mod_base = OTHER; note = 2'-O-methyladenosine
tatctaactggctatggtatgga

SEQ ID NO: 454 - RNA, 23 nt, synthetic construct
  source 1..23: mol_type = other RNA
  modified_base 1: mod_base = OTHER; note = 2'-O-methyluridine-3'-phosphorothioate 5'-(E)-Vinylphosphonate
  modified_base 2: mod_base = OTHER; note = 2'-deoxy-2'-fluorocytidine-3'-phosphorothioate
  modified_base 3: mod_base = OTHER; note = 2'-O-methyluridine-3'-phosphate
  modified_base 4: mod_base = OTHER; note = 2'-O-methylguanosine-3'-phosphate
  modified_base 5: mod_base = OTHER; note = 2'-O-methylguanosine-3'-phosphate
  modified_base 6: mod_base = OTHER; note = 2'-deoxy-2'-fluorouridine-3'-phosphate
  modified_base 7: mod_base = OTHER; note = 2'-O-methyladenosine-3'-phosphate
  modified_base 8: mod_base = OTHER; note = 2'-deoxy-2'-fluoroadenosine-3'-phosphate
  modified_base 9: mod_base = OTHER; note = 2'-deoxy-2'-fluoroguanosine-3'-phosphate
  modified_base 10: mod_base = OTHER; note = 2'-O-methyladenosine-3'-phosphate
  modified_base 11: mod_base = OTHER; note = 2'-O-methylguanosine-3'-phosphate
  modified_base 12: mod_base = OTHER; note = 2'-O-methylguanosine-3'-phosphate
  modified_base 13: mod_base = OTHER; note = 2'-O-methyluridine-3'-phosphate
  modified_base 14: mod_base = OTHER; note = 2'-deoxy-2'-fluorouridine-3'-phosphate
  modified_base 15: mod_base = OTHER; note = 2'-O-methylguanosine-3'-phosphate
  modified_base 16: mod_base = OTHER; note = 2'-deoxy-2'-fluoroguanosine-3'-phosphate
  modified_base 17: mod_base = OTHER; note = 2'-O-methyladenosine-3'-phosphate
  modified_base 18: mod_base = OTHER; note = 2'-O-methylguanosine-3'-phosphate
  modified_base 19: mod_base = OTHER; note = 2'-O-methyluridine-3'-phosphate
  modified_base 20: mod_base = OTHER; note = 2'-O-methylguanosine-3'-phosphate
  modified_base 21: mod_base = OTHER; note = 2'-O-methylguanosine-3'-phosphorothioate
  modified_base 22: mod_base = OTHER; note = 2'-O-methyladenosine-3'-phosphorothioate
  modified_base 23: mod_base = OTHER; note = 2'-O-methylguanosine
tctggtaagaggttggagtggag

SEQ ID NO: 455 - RNA, 23 nt, synthetic construct
  source 1..23: mol_type = other RNA
  modified_base 1: mod_base = OTHER; note = 2'-O-methyluridine-3'-phosphorothioate 5'-(E)-Vinylphosphonate
  modified_base 2: mod_base = OTHER; note = 2'-deoxy-2'-fluoroguanosine-3'-phosphorothioate
  modified_base 3: mod_base = OTHER; note = 2'-O-methyladenosine-3'-phosphate
  modified_base 4: mod_base = OTHER; note = 2'-O-methyluridine-3'-phosphate
  modified_base 5: mod_base = OTHER; note = 2'-O-methylguanosine-3'-phosphate
  modified_base 6: mod_base = OTHER; note = 2'-deoxy-2'-fluorouridine-3'-phosphate
  modified_base 7: mod_base = OTHER; note = 2'-O-methylguanosine-3'-phosphate
  modified_base 8: mod_base = OTHER; note = 2'-deoxy-2'-fluoroadenosine-3'-phosphate
  modified_base 9: mod_base = OTHER; note = 2'-deoxy-2'-fluoroadenosine-3'-phosphate
  modified_base 10: mod_base = OTHER; note = 2'-O-methyladenosine-3'-phosphate
  modified_base 11: mod_base = OTHER; note = 2'-O-methylguanosine-3'-phosphate
  modified_base 12: mod_base = OTHER; note = 2'-O-methyluridine-3'-phosphate
  modified_base 13: mod_base = OTHER; note = 2'-O-methylguanosine-3'-phosphate
  modified_base 14: mod_base = OTHER; note = 2'-deoxy-2'-fluorocytidine-3'-phosphate
  modified_base 15: mod_base = OTHER; note = 2'-O-methyluridine-3'-phosphate
  modified_base 16: mod_base = OTHER; note = 2'-deoxy-2'-fluorouridine-3'-phosphate
  modified_base 17: mod_base = OTHER; note = 2'-O-methylguanosine-3'-phosphate
  modified_base 18: mod_base = OTHER; note = 2'-O-methylguanosine-3'-phosphate
  modified_base 19: mod_base = OTHER; note = 2'-O-methylguanosine-3'-phosphate
  modified_base 20: mod_base = OTHER; note = 2'-O-methyladenosine-3'-phosphate
  modified_base 21: mod_base = OTHER; note = 2'-O-methylguanosine-3'-phosphorothioate
  modified_base 22: mod_base = OTHER; note = 2'-O-methylcytidine-3'-phosphorothioate
  modified_base 23: mod_base = OTHER; note = 2'-O-methylcytidine
tgatgtgaaagtgcttgggagcc

SEQ ID NO: 456 - RNA, 23 nt, synthetic construct
  source 1..23: mol_type = other RNA
  modified_base 1: mod_base = OTHER; note = 2'-O-methyluridine-3'-phosphorothioate 5'-(E)-Vinylphosphonate
  modified_base 2: mod_base = OTHER; note = 2'-deoxy-2'-fluorouridine-3'-phosphorothioate
  modified_base 3: mod_base = OTHER; note = 2'-O-methyluridine-3'-phosphate
  modified_base 4: mod_base = OTHER; note = 2'-O-methylcytidine-3'-phosphate
  modified_base 5: mod_base = OTHER; note = 2'-O-methylcytidine-3'-phosphate
  modified_base 6: mod_base = OTHER; note = 2'-deoxy-2'-fluoroguanosine-3'-phosphate
  modified_base 7: mod_base = OTHER; note = 2'-O-methylguanosine-3'-phosphate
  modified_base 8: mod_base = OTHER; note = 2'-deoxy-2'-fluorouridine-3'-phosphate
  modified_base 9: mod_base = OTHER; note = 2'-deoxy-2'-fluoroadenosine-3'-phosphate
  modified_base 10: mod_base = OTHER; note = 2'-O-methylguanosine-3'-phosphate
  modified_base 11: mod_base = OTHER; note = 2'-O-methyladenosine-3'-phosphate
  modified_base 12: mod_base = OTHER; note = 2'-O-methyluridine-3'-phosphate
  modified_base 13: mod_base = OTHER; note = 2'-O-methylguanosine-3'-phosphate
  modified_base 14: mod_base = OTHER; note = 2'-deoxy-2'-fluorouridine-3'-phosphate
  modified_base 15: mod_base = OTHER; note = 2'-O-methyluridine-3'-phosphate
  modified_base 16: mod_base = OTHER; note = 2'-deoxy-2'-fluoroadenosine-3'-phosphate
  modified_base 17: mod_base = OTHER; note = 2'-O-methylcytidine-3'-phosphate
  modified_base 18: mod_base = OTHER; note = 2'-O-methyluridine-3'-phosphate
  modified_base 19: mod_base = OTHER; note = 2'-O-methylguanosine-3'-phosphate
  modified_base 20: mod_base = OTHER; note = 2'-O-methyluridine-3'-phosphate
  modified_base 21: mod_base = OTHER; note = 2'-O-methylcytidine-3'-phosphorothioate
  modified_base 22: mod_base = OTHER; note = 2'-O-methyluridine-3'-phosphorothioate
  modified_base 23: mod_base = OTHER; note = 2'-O-methylcytidine
tttccggtagatgttactgtctc

SEQ ID NO: 457 - RNA, 23 nt, synthetic construct
  source 1..23: mol_type = other RNA
  modified_base 1: mod_base = OTHER; note = 2'-O-methyluridine-3'-phosphorothioate 5'-(E)-Vinylphosphonate
  modified_base 2: mod_base = OTHER; note = 2'-deoxy-2'-fluorouridine-3'-phosphorothioate
  modified_base 3: mod_base = OTHER; note = 2'-O-methyluridine-3'-phosphate
  modified_base 4: mod_base = OTHER; note = 2'-O-methylguanosine-3'-phosphate
  modified_base 5: mod_base = OTHER; note = 2'-O-methylcytidine-3'-phosphate
  modified_base 6: mod_base = OTHER; note = 2'-deoxy-2'-fluorouridine-3'-phosphate
  modified_base 7: mod_base = OTHER; note = 2'-O-methylguanosine-3'-phosphate
  modified_base 8: mod_base = OTHER; note = 2'-deoxy-2'-fluorouridine-3'-phosphate
  modified_base 9: mod_base = OTHER; note = 2'-deoxy-2'-fluoroadenosine-3'-phosphate
  modified_base 10: mod_base = OTHER; note = 2'-O-methylguanosine-3'-phosphate
  modified_base 11: mod_base = OTHER; note = 2'-O-methyladenosine-3'-phosphate
  modified_base 12: mod_base = OTHER; note = 2'-O-methylcytidine-3'-phosphate
  modified_base 13: mod_base = OTHER; note = 2'-O-methyladenosine-3'-phosphate
  modified_base 14: mod_base = OTHER; note = 2'-deoxy-2'-fluoroadenosine-3'-phosphate
  modified_base 15: mod_base = OTHER; note = 2'-O-methyladenosine-3'-phosphate
  modified_base 16: mod_base = OTHER; note = 2'-deoxy-2'-fluorouridine-3'-phosphate
  modified_base 17: mod_base = OTHER; note = 2'-O-methylcytidine-3'-phosphate
  modified_base 18: mod_base = OTHER; note = 2'-O-methyladenosine-3'-phosphate
  modified_base 19: mod_base = OTHER; note = 2'-O-methylcytidine-3'-phosphate
  modified_base 20: mod_base = OTHER; note = 2'-O-methylcytidine-3'-phosphate
  modified_base 21: mod_base = OTHER; note = 2'-O-methyladenosine-3'-phosphorothioate
  modified_base 22: mod_base = OTHER; note = 2'-O-methyluridine-3'-phosphorothioate
  modified_base 23: mod_base = OTHER; note = 2'-O-methylguanosine
tttgctgtagacaaatcaccatg

SEQ ID NO: 458 - RNA, 23 nt, synthetic construct
  source 1..23: mol_type = other RNA
  modified_base 1: mod_base = OTHER; note = 2'-O-methyluridine-3'-phosphorothioate 5'-(E)-Vinylphosphonate
  modified_base 2: mod_base = OTHER; note = 2'-deoxy-2'-fluorouridine-3'-phosphorothioate
  modified_base 3: mod_base = OTHER; note = 2'-O-methylguanosine-3'-phosphate
  modified_base 4: mod_base = OTHER; note = 2'-O-methylguanosine-3'-phosphate
  modified_base 5: mod_base = OTHER; note = 2'-O-methylcytidine-3'-phosphate
  modified_base 6: mod_base = OTHER; note = 2'-deoxy-2'-fluorouridine-3'-phosphate
  modified_base 7: mod_base = OTHER; note = 2'-O-methylguanosine-3'-phosphate
  modified_base 8: mod_base = OTHER; note = 2'-deoxy-2'-fluoroadenosine-3'-phosphate
  modified_base 9: mod_base = OTHER; note = 2'-deoxy-2'-fluorouridine-3'-phosphate
  modified_base 10: mod_base = OTHER; note = 2'-O-methylguanosine-3'-phosphate
  modified_base 11: mod_base = OTHER; note = 2'-O-methyluridine-3'-phosphate
  modified_base 12: mod_base = OTHER; note = 2'-O-methylcytidine-3'-phosphate
  modified_base 13: mod_base = OTHER; note = 2'-O-methyluridine-3'-phosphate
  modified_base 14: mod_base = OTHER; note = 2'-deoxy-2'-fluorouridine-3'-phosphate
  modified_base 15: mod_base = OTHER; note = 2'-O-methylcytidine-3'-phosphate
  modified_base 16: mod_base = OTHER; note = 2'-deoxy-2'-fluoroadenosine-3'-phosphate
  modified_base 17: mod_base = OTHER; note = 2'-O-methylcytidine-3'-phosphate
  modified_base 18: mod_base = OTHER; note = 2'-O-methyluridine-3'-phosphate
  modified_base 19: mod_base = OTHER; note = 2'-O-methyluridine-3'-phosphate
  modified_base 20: mod_base = OTHER; note = 2'-O-methylguanosine-3'-phosphate
  modified_base 21: mod_base = OTHER; note = 2'-O-methyluridine-3'-phosphorothioate
  modified_base 22: mod_base = OTHER; note = 2'-O-methyluridine-3'-phosphorothioate
  modified_base 23: mod_base = OTHER; note = 2'-O-methyluridine
ttggctgatgtcttcacttgttt

SEQ ID NO: 459 - RNA, 23 nt, synthetic construct
  source 1..23: mol_type = other RNA
  modified_base 1: mod_base = OTHER; note = 2'-O-methyluridine-3'-phosphorothioate 5'-(E)-Vinylphosphonate
  modified_base 2: mod_base = OTHER; note = 2'-deoxy-2'-fluoroadenosine-3'-phosphorothioate
  modified_base 3: mod_base = OTHER; note = 2'-O-methyluridine-3'-phosphate
  modified_base 4: mod_base = OTHER; note = 2'-O-methylguanosine-3'-phosphate
  modified_base 5: mod_base = OTHER; note = 2'-O-methylguanosine-3'-phosphate
  modified_base 6: mod_base = OTHER; note = 2'-deoxy-2'-fluoroguanosine-3'-phosphate
  modified_base 7: mod_base = OTHER; note = 2'-O-methyladenosine-3'-phosphate
  modified_base 8: mod_base = OTHER; note = 2'-deoxy-2'-fluorocytidine-3'-phosphate
  modified_base 9: mod_base = OTHER; note = 2'-deoxy-2'-fluorouridine-3'-phosphate
  modified_base 10: mod_base = OTHER; note = 2'-O-methylguanosine-3'-phosphate
  modified_base 11: mod_base = OTHER; note = 2'-O-methyluridine-3'-phosphate
  modified_base 12: mod_base = OTHER; note = 2'-O-methyladenosine-3'-phosphate
  modified_base 13: mod_base = OTHER; note = 2'-O-methylcytidine-3'-phosphate
  modified_base 14: mod_base = OTHER; note = 2'-deoxy-2'-fluorouridine-3'-phosphate
  modified_base 15: mod_base = OTHER; note = 2'-O-methyluridine-3'-phosphate
  modified_base 16: mod_base = OTHER; note = 2'-deoxy-2'-fluoroguanosine-3'-phosphate
  modified_base 17: mod_base = OTHER; note = 2'-O-methylguanosine-3'-phosphate
  modified_base 18: mod_base = OTHER; note = 2'-O-methyladenosine-3'-phosphate
  modified_base 19: mod_base = OTHER; note = 2'-O-methylguanosine-3'-phosphate
  modified_base 20: mod_base = OTHER; note = 2'-O-methylguanosine-3'-phosphate
  modified_base 21: mod_base = OTHER; note = 2'-O-methyluridine-3'-phosphorothioate
  modified_base 22: mod_base = OTHER; note = 2'-O-methylcytidine-3'-phosphorothioate
  modified_base 23: mod_base = OTHER; note = 2'-O-methyluridine
tatgggactgtacttggaggtct

SEQ ID NO: 460 - RNA, 23 nt, synthetic construct
  source 1..23: mol_type = other RNA
  modified_base 1: mod_base = OTHER; note = 2'-O-methyluridine-3'-phosphorothioate 5'-(E)-Vinylphosphonate
  modified_base 2: mod_base = OTHER; note = 2'-deoxy-2'-fluoroguanosine-3'-phosphorothioate
  modified_base 3: mod_base = OTHER; note = 2'-O-methyluridine-3'-phosphate
  modified_base 4: mod_base = OTHER; note = 2'-O-methylcytidine-3'-phosphate
  modified_base 5: mod_base = OTHER; note = 2'-O-methylcytidine-3'-phosphate
  modified_base 6: mod_base = OTHER; note = 2'-deoxy-2'-fluoroadenosine-3'-phosphate
  modified_base 7: mod_base = OTHER; note = 2'-O-methylguanosine-3'-phosphate
  modified_base 8: mod_base = OTHER; note = 2'-deoxy-2'-fluorouridine-3'-phosphate
  modified_base 9: mod_base = OTHER; note = 2'-deoxy-2'-fluoroadenosine-3'-phosphate
  modified_base 10: mod_base = OTHER; note = 2'-O-methylcytidine-3'-phosphate
  modified_base 11: mod_base = OTHER; note = 2'-O-methyluridine-3'-phosphate
  modified_base 12: mod_base = OTHER; note = 2'-O-methylcytidine-3'-phosphate
  modified_base 13: mod_base = OTHER; note = 2'-O-methyladenosine-3'-phosphate
  modified_base 14: mod_base = OTHER; note = 2'-deoxy-2'-fluoroguanosine-3'-phosphate
  modified_base 15: mod_base = OTHER; note = 2'-O-methyladenosine-3'-phosphate
  modified_base 16: mod_base = OTHER; note = 2'-deoxy-2'-fluorocytidine-3'-phosphate
  modified_base 17: mod_base = OTHER; note = 2'-O-methyluridine-3'-phosphate
  modified_base 18: mod_base = OTHER; note = 2'-O-methylcytidine-3'-phosphate
  modified_base 19: mod_base = OTHER; note = 2'-O-methylcytidine-3'-phosphate
  modified_base 20: mod_base = OTHER; note = 2'-O-methylguanosine-3'-phosphate
  modified_base 21: mod_base = OTHER; note = 2'-O-methyladenosine-3'-phosphorothioate
  modified_base 22: mod_base = OTHER; note = 2'-O-methyladenosine-3'-phosphorothioate
  modified_base 23: mod_base = OTHER; note = 2'-O-methylguanosine
tgtccagtactcagactccgaag

SEQ ID NO: 461 - RNA, 23 nt, synthetic construct
  source 1..23: mol_type = other RNA
  modified_base 1: mod_base = OTHER; note = 2'-O-methyluridine-3'-phosphorothioate 5'-(E)-Vinylphosphonate
  modified_base 2: mod_base = OTHER; note = 2'-deoxy-2'-fluorocytidine-3'-phosphorothioate
  modified_base 3: mod_base = OTHER; note = 2'-O-methyladenosine-3'-phosphate
  modified_base 4: mod_base = OTHER; note = 2'-O-methylguanosine-3'-phosphate
  modified_base 5: mod_base = OTHER; note = 2'-O-methyladenosine-3'-phosphate
  modified_base 6: mod_base = OTHER; note = 2'-deoxy-2'-fluorocytidine-3'-phosphate
  modified_base 7: mod_base = OTHER; note = 2'-O-methylguanosine-3'-phosphate
  modified_base 8: mod_base = OTHER; note = 2'-deoxy-2'-fluoroadenosine-3'-phosphate
  modified_base 9: mod_base = OTHER; note = 2'-deoxy-2'-fluoroguanosine-3'-phosphate
  modified_base 10: mod_base = OTHER; note = 2'-O-methyladenosine-3'-phosphate
  modified_base 11: mod_base = OTHER; note = 2'-O-methyladenosine-3'-phosphate
  modified_base 12: mod_base = OTHER; note = 2'-O-methylcytidine-3'-phosphate
  modified_base 13: mod_base = OTHER; note = 2'-O-methylcytidine-3'-phosphate
  modified_base 14: mod_base = OTHER; note = 2'-deoxy-2'-fluorouridine-3'-phosphate
  modified_base 15: mod_base = OTHER; note = 2'-O-methyluridine-3'-phosphate
  modified_base 16: mod_base = OTHER; note = 2'-deoxy-2'-fluorocytidine-3'-phosphate
  modified_base 17: mod_base = OTHER; note = 2'-O-methyluridine-3'-phosphate
  modified_base 18: mod_base = OTHER; note = 2'-O-methylguanosine-3'-phosphate
  modified_base 19: mod_base = OTHER; note = 2'-O-methylguanosine-3'-phosphate
  modified_base 20: mod_base = OTHER; note = 2'-O-methylcytidine-3'-phosphate
  modified_base 21: mod_base = OTHER; note = 2'-O-methyluridine-3'-phosphorothioate
  modified_base 22: mod_base = OTHER; note = 2'-O-methylcytidine-3'-phosphorothioate
  modified_base 23: mod_base = OTHER; note = 2'-O-methylguanosine
tcagacgagaaccttctggctcg

SEQ ID NO: 462 - RNA, 23 nt, synthetic construct
  source 1..23: mol_type = other RNA
  modified_base 1: mod_base = OTHER; note = 2'-O-methyluridine-3'-phosphorothioate 5'-(E)-Vinylphosphonate
  modified_base 2: mod_base = OTHER; note = 2'-deoxy-2'-fluorocytidine-3'-phosphorothioate
  modified_base 3: mod_base = OTHER; note = 2'-O-methylguanosine-3'-phosphate
  modified_base 4: mod_base = OTHER; note = 2'-O-methylguanosine-3'-phosphate
  modified_base 5: mod_base = OTHER; note = 2'-O-methyluridine-3'-phosphate
  modified_base 6: mod_base = OTHER; note = 2'-deoxy-2'-fluorocytidine-3'-phosphate
  modified_base 7: mod_base = OTHER; note = 2'-O-methyladenosine-3'-phosphate
  modified_base 8: mod_base = OTHER; note = 2'-deoxy-2'-fluoroadenosine-3'-phosphate
  modified_base 9: mod_base = OTHER; note = 2'-deoxy-2'-fluoroadenosine-3'-phosphate
  modified_base 10: mod_base = OTHER; note = 2'-O-methyladenosine-3'-phosphate
  modified_base 11: mod_base = OTHER; note = 2'-O-methyluridine-3'-phosphate
  modified_base 12: mod_base = OTHER; note = 2'-O-methylcytidine-3'-phosphate
  modified_base 13: mod_base = OTHER; note = 2'-O-methyladenosine-3'-phosphate
  modified_base 14: mod_base = OTHER; note = 2'-deoxy-2'-fluorouridine-3'-phosphate
  modified_base 15: mod_base = OTHER; note = 2'-O-methylcytidine-3'-phosphate
  modified_base 16: mod_base = OTHER; note = 2'-deoxy-2'-fluorocytidine-3'-phosphate
  modified_base 17: mod_base = OTHER; note = 2'-O-methyluridine-3'-phosphate
  modified_base 18: mod_base = OTHER; note = 2'-O-methylcytidine-3'-phosphate
  modified_base 19: mod_base = OTHER; note = 2'-O-methylcytidine-3'-phosphate
  modified_base 20: mod_base = OTHER; note = 2'-O-methyluridine-3'-phosphate
  modified_base 21: mod_base = OTHER; note = 2'-O-methylcytidine-3'-phosphorothioate
  modified_base 22: mod_base = OTHER; note = 2'-O-methyluridine-3'-phosphorothioate
  modified_base 23: mod_base = OTHER; note = 2'-O-methylcytidine
tcggtcaaaatcatcctcctctc

SEQ ID NO: 463 - RNA, 23 nt, synthetic construct
  source 1..23: mol_type = other RNA
  modified_base 1: mod_base = OTHER; note = 2'-O-methyluridine-3'-phosphorothioate 5'-(E)-Vinylphosphonate
  modified_base 2: mod_base = OTHER; note = 2'-deoxy-2'-fluoroadenosine-3'-phosphorothioate
  modified_base 3: mod_base = OTHER; note = 2'-O-methyladenosine-3'-phosphate
  modified_base 4: mod_base = OTHER; note = 2'-O-methyluridine-3'-phosphate
  modified_base 5: mod_base = OTHER; note = 2'-O-methyluridine-3'-phosphate
  modified_base 6: mod_base = OTHER; note = 2'-deoxy-2'-fluorocytidine-3'-phosphate
  modified_base 7: mod_base = OTHER; note = 2'-O-methylcytidine-3'-phosphate
  modified_base 8: mod_base = OTHER; note = 2'-deoxy-2'-fluoroadenosine-3'-phosphate
  modified_base 9: mod_base = OTHER; note = 2'-deoxy-2'-fluorocytidine-3'-phosphate
  modified_base 10: mod_base = OTHER; note = 2'-O-methyluridine-3'-phosphate
  modified_base 11: mod_base = OTHER; note = 2'-O-methyluridine-3'-phosphate
  modified_base 12: mod_base = OTHER; note = 2'-O-methyluridine-3'-phosphate
  modified_base 13: mod_base = OTHER; note = 2'-O-methylguanosine-3'-phosphate
  modified_base 14: mod_base = OTHER; note = 2'-deoxy-2'-fluoroguanosine-3'-phosphate
  modified_base 15: mod_base = OTHER; note = 2'-O-methyladenosine-3'-phosphate
  modified_base 16: mod_base = OTHER; note = 2'-deoxy-2'-fluoroguanosine-3'-phosphate
  modified_base 17: mod_base = OTHER; note = 2'-O-methylcytidine-3'-phosphate
  modified_base 18: mod_base = OTHER; note = 2'-O-methyluridine-3'-phosphate
  modified_base 19: mod_base = OTHER; note = 2'-O-methyluridine-3'-phosphate
  modified_base 20: mod_base = OTHER; note = 2'-O-methylguanosine-3'-phosphate
  modified_base 21: mod_base = OTHER; note = 2'-O-methyluridine-3'-phosphorothioate
  modified_base 22: mod_base = OTHER; note = 2'-O-methylguanosine-3'-phosphorothioate
  modified_base 23: mod_base = OTHER; note = 2'-O-methylcytidine
taattccactttggagcttgtgc

SEQ ID NO: 464 - RNA, 23 nt, synthetic construct
  source 1..23: mol_type = other RNA
  modified_base 1: mod_base = OTHER; note = 2'-O-methyluridine-3'-phosphorothioate 5'-(E)-Vinylphosphonate
  modified_base 2: mod_base = OTHER; note = 2'-deoxy-2'-fluorouridine-3'-phosphorothioate
  modified_base 3: mod_base = OTHER; note = 2'-O-methylcytidine-3'-phosphate
  modified_base 4: mod_base = OTHER; note = 2'-O-methyluridine-3'-phosphate
  modified_base 5: mod_base = OTHER; note = 2'-O-methyluridine-3'-phosphate
  modified_base 6: mod_base = OTHER; note = 2'-deoxy-2'-fluorocytidine-3'-phosphate
  modified_base 7: mod_base = OTHER; note = 2'-O-methylcytidine-3'-phosphate
  modified_base 8: mod_base = OTHER; note = 2'-deoxy-2'-fluorouridine-3'-phosphate
  modified_base 9: mod_base = OTHER; note = 2'-deoxy-2'-fluorouridine-3'-phosphate
  modified_base 10: mod_base = OTHER; note = 2'-O-methylcytidine-3'-phosphate
  modified_base 11: mod_base = OTHER; note = 2'-O-methyladenosine-3'-phosphate
  modified_base 12: mod_base = OTHER; note = 2'-O-methylguanosine-3'-phosphate
  modified_base 13: mod_base = OTHER; note = 2'-O-methyladenosine-3'-phosphate
  modified_base 14: mod_base = OTHER; note = 2'-deoxy-2'-fluoroadenosine-3'-phosphate
  modified_base 15: mod_base = OTHER; note = 2'-O-methyluridine-3'-phosphate
  modified_base 16: mod_base = OTHER; note = 2'-deoxy-2'-fluorocytidine-3'-phosphate
  modified_base 17: mod_base = OTHER; note = 2'-O-methyladenosine-3'-phosphate
  modified_base 18: mod_base = OTHER; note = 2'-O-methylguanosine-3'-phosphate
  modified_base 19: mod_base = OTHER; note = 2'-O-methylcytidine-3'-phosphate
  modified_base 20: mod_base = OTHER; note = 2'-O-methylcytidine-3'-phosphate
  modified_base 21: mod_base = OTHER; note = 2'-O-methylguanosine-3'-phosphorothioate
  modified_base 22: mod_base = OTHER; note = 2'-O-methylguanosine-3'-phosphorothioate
  modified_base 23: mod_base = OTHER; note = 2'-O-methylcytidine
ttcttccttcagaatcagccggc

SEQ ID NO: 465 - RNA, 23 nt, synthetic construct
  source 1..23: mol_type = other RNA
  modified_base 1: mod_base = OTHER; note = 2'-O-methyluridine-3'-phosphorothioate 5'-(E)-Vinylphosphonate
  modified_base 2: mod_base = OTHER; note = 2'-deoxy-2'-fluorocytidine-3'-phosphorothioate
  modified_base 3: mod_base = OTHER; note = 2'-O-methyladenosine-3'-phosphate
  modified_base 4: mod_base = OTHER; note = 2'-O-methylguanosine-3'-phosphate
  modified_base 5: mod_base = OTHER; note = 2'-O-methylguanosine-3'-phosphate
  modified_base 6: mod_base = OTHER; note = 2'-deoxy-2'-fluoroguanosine-3'-phosphate
  modified_base 7: mod_base = OTHER; note = 2'-O-methyladenosine-3'-phosphate
  modified_base 8: mod_base = OTHER; note = 2'-deoxy-2'-fluorouridine-3'-phosphate
  modified_base 9: mod_base = OTHER; note = 2'-deoxy-2'-fluorocytidine-3'-phosphate
  modified_base 10: mod_base = OTHER; note = 2'-O-methyluridine-3'-phosphate
  modified_base 11: mod_base = OTHER; note = 2'-O-methylguanosine-3'-phosphate
  modified_base 12: mod_base = OTHER; note = 2'-O-methylcytidine-3'-phosphate
  modified_base 13: mod_base = OTHER; note = 2'-O-methyladenosine-3'-phosphate
  modified_base 14: mod_base = OTHER; note = 2'-deoxy-2'-fluorouridine-3'-phosphate
  modified_base 15: mod_base = OTHER; note = 2'-O-methyladenosine-3'-phosphate
  modified_base 16: mod_base = OTHER; note = 2'-deoxy-2'-fluoroguanosine-3'-phosphate
  modified_base 17: mod_base = OTHER; note = 2'-O-methylguanosine-3'-phosphate
  modified_base 18: mod_base = OTHER; note = 2'-O-methyladenosine-3'-phosphate
  modified_base 19: mod_base = OTHER; note = 2'-O-methylguanosine-3'-phosphate
  modified_base 20: mod_base = OTHER; note = 2'-O-methylcytidine-3'-phosphate
  modified_base 21: mod_base = OTHER; note = 2'-O-methyluridine-3'-phosphorothioate
  modified_base 22: mod_base = OTHER; note = 2'-O-methylcytidine-3'-phosphorothioate
  modified_base 23: mod_base = OTHER; note = 2'-O-methylguanosine
tcagggatctgcataggagctcg

SEQ ID NO: 466 - RNA, 23 nt, synthetic construct
  source 1..23: mol_type = other RNA
  modified_base 1: mod_base = OTHER; note = 2'-O-methyluridine-3'-phosphorothioate 5'-(E)-Vinylphosphonate
  modified_base 2: mod_base = OTHER; note = 2'-deoxy-2'-fluorouridine-3'-phosphorothioate
  modified_base 3: mod_base = OTHER; note = 2'-O-methylguanosine-3'-phosphate
  modified_base 4: mod_base = OTHER; note = 2'-O-methyladenosine-3'-phosphate
  modified_base 5: mod_base = OTHER; note = 2'-O-methylguanosine-3'-phosphate
  modified_base 6: mod_base = OTHER; note = 2'-deoxy-2'-fluoroguanosine-3'-phosphate
  modified_base 7: mod_base = OTHER; note = 2'-O-methylguanosine-3'-phosphate
  modified_base 8: mod_base = OTHER; note = 2'-deoxy-2'-fluoroadenosine-3'-phosphate
  modified_base 9: mod_base = OTHER; note = 2'-deoxy-2'-fluorocytidine-3'-phosphate
  modified_base 10: mod_base = OTHER; note = 2'-O-methyladenosine-3'-phosphate
  modified_base 11: mod_base = OTHER; note = 2'-O-methyluridine-3'-phosphate
  modified_base 12: mod_base = OTHER; note = 2'-O-methylcytidine-3'-phosphate
  modified_base 13: mod_base = OTHER; note = 2'-O-methyluridine-3'-phosphate
  modified_base 14: mod_base = OTHER; note = 2'-deoxy-2'-fluorocytidine-3'-phosphate
  modified_base 15: mod_base = OTHER; note = 2'-O-methyladenosine-3'-phosphate
  modified_base 16: mod_base = OTHER; note = 2'-deoxy-2'-fluorouridine-3'-phosphate
  modified_base 17: mod_base = OTHER; note = 2'-O-methyladenosine-3'-phosphate
  modified_base 18: mod_base = OTHER; note = 2'-O-methylguanosine-3'-phosphate
  modified_base 19: mod_base = OTHER; note = 2'-O-methylcytidine-3'-phosphate
  modified_base 20: mod_base = OTHER; note = 2'-O-methylcytidine-3'-phosphate
  modified_base 21: mod_base = OTHER; note = 2'-O-methyladenosine-3'-phosphorothioate
  modified_base 22: mod_base = OTHER; note = 2'-O-methylguanosine-3'-phosphorothioate
  modified_base 23: mod_base = OTHER; note = 2'-O-methylcytidine
ttgagggacatctcatagccagc

SEQ ID NO: 467 - RNA, 23 nt, synthetic construct
  source 1..23: mol_type = other RNA
  modified_base 1: mod_base = OTHER; note = 2'-O-methyluridine-3'-phosphorothioate 5'-(E)-Vinylphosphonate
  modified_base 2: mod_base = OTHER; note = 2'-deoxy-2'-fluorocytidine-3'-phosphorothioate
  modified_base 3: mod_base = OTHER; note = 2'-O-methyladenosine-3'-phosphate
  modified_base 4: mod_base = OTHER; note = 2'-O-methylguanosine-3'-phosphate
  modified_base 5: mod_base = OTHER; note = 2'-O-methyladenosine-3'-phosphate
  modified_base 6: mod_base = OTHER; note = 2'-deoxy-2'-fluorouridine-3'-phosphate
  modified_base 7: mod_base = OTHER; note = 2'-O-methyluridine-3'-phosphate
  modified_base 8: mod_base = OTHER; note = 2'-deoxy-2'-fluorouridine-3'-phosphate
  modified_base 9: mod_base = OTHER; note = 2'-deoxy-2'-fluoroguanosine-3'-phosphate
  modified_base 10: mod_base = OTHER; note = 2'-O-methylguanosine-3'-phosphate
  modified_base 11: mod_base = OTHER; note = 2'-O-methyladenosine-3'-phosphate
  modified_base 12: mod_base = OTHER; note = 2'-O-methylguanosine-3'-phosphate
  modified_base 13: mod_base = OTHER; note = 2'-O-methyladenosine-3'-phosphate
  modified_base 14: mod_base = OTHER; note = 2'-deoxy-2'-fluorouridine-3'-phosphate
  modified_base 15: mod_base = OTHER; note = 2'-O-methylguanosine-3'-phosphate
  modified_base 16: mod_base = OTHER; note = 2'-deoxy-2'-fluoroadenosine-3'-phosphate
  modified_base 17: mod_base = OTHER; note = 2'-O-methylguanosine-3'-phosphate
  modified_base 18: mod_base = OTHER; note = 2'-O-methyladenosine-3'-phosphate
  modified_base 19: mod_base = OTHER; note = 2'-O-methylguanosine-3'-phosphate
  modified_base 20: mod_base = OTHER; note = 2'-O-methylguanosine-3'-phosphate
  modified_base 21: mod_base = OTHER; note = 2'-O-methyladenosine-3'-phosphorothioate
  modified_base 22: mod_base = OTHER; note = 2'-O-methyluridine-3'-phosphorothioate
  modified_base 23: mod_base = OTHER; note = 2'-O-methylcytidine
tcagatttggagatgagaggatc

SEQ ID NO: 468 - RNA, 23 nt, synthetic construct
  source 1..23: mol_type = other RNA
  modified_base 1: mod_base = OTHER; note = 2'-O-methyluridine-3'-phosphorothioate 5'-(E)-Vinylphosphonate
  modified_base 2: mod_base = OTHER; note = 2'-deoxy-2'-fluoroadenosine-3'-phosphorothioate
  modified_base 3: mod_base = OTHER; note = 2'-O-methylguanosine-3'-phosphate
  modified_base 4: mod_base = OTHER; note = 2'-O-methylcytidine-3'-phosphate
  modified_base 5: mod_base = OTHER; note = 2'-O-methylcytidine-3'-phosphate
  modified_base 6: mod_base = OTHER; note = 2'-deoxy-2'-fluorocytidine-3'-phosphate
  modified_base 7: mod_base = OTHER; note = 2'-O-methyladenosine-3'-phosphate
  modified_base 8: mod_base = OTHER; note = 2'-deoxy-2'-fluorouridine-3'-phosphate
  modified_base 9: mod_base = OTHER; note = 2'-deoxy-2'-fluorouridine-3'-phosphate
  modified_base 10: mod_base = OTHER; note = 2'-O-methyluridine-3'-phosphate
  modified_base 11: mod_base = OTHER; note = 2'-O-methylcytidine-3'-phosphate
  modified_base 12: mod_base = OTHER; note = 2'-O-methyluridine-3'-phosphate
  modified_base 13: mod_base = OTHER; note = 2'-O-methyluridine-3'-phosphate
  modified_base 14: mod_base = OTHER; note = 2'-deoxy-2'-fluorocytidine-3'-phosphate
  modified_base 15: mod_base = OTHER; note = 2'-O-methylguanosine-3'-phosphate
  modified_base 16: mod_base = OTHER; note = 2'-deoxy-2'-fluoroguanosine-3'-phosphate
  modified_base 17: mod_base = OTHER; note = 2'-O-methyluridine-3'-phosphate
  modified_base 18: mod_base = OTHER; note = 2'-O-methyladenosine-3'-phosphate
  modified_base 19: mod_base = OTHER; note = 2'-O-methylguanosine-3'-phosphate
  modified_base 20: mod_base = OTHER; note = 2'-O-methylguanosine-3'-phosphate
  modified_base 21: mod_base = OTHER; note = 2'-O-methylcytidine-3'-phosphorothioate
  modified_base 22: mod_base = OTHER; note = 2'-O-methyladenosine-3'-phosphorothioate
  modified_base 23: mod_base = OTHER; note = 2'-O-methylguanosine
tagcccatttcttcggtaggcag

SEQ ID NO: 469 - RNA, 23 nt, synthetic construct
  source 1..23: mol_type = other RNA
  modified_base 1: mod_base = OTHER; note = 2'-O-methyluridine-3'-phosphorothioate 5'-(E)-Vinylphosphonate
  modified_base 2: mod_base = OTHER; note = 2'-deoxy-2'-fluoroadenosine-3'-phosphorothioate
  modified_base 3: mod_base = OTHER; note = 2'-O-methyluridine-3'-phosphate
  modified_base 4: mod_base = OTHER; note = 2'-O-methylguanosine-3'-phosphate
  modified_base 5: mod_base = OTHER; note = 2'-O-methylcytidine-3'-phosphate
  modified_base 6: mod_base = OTHER; note = 2'-deoxy-2'-fluorouridine-3'-phosphate
  modified_base 7: mod_base = OTHER; note = 2'-O-methylguanosine-3'-phosphate
  modified_base 8: mod_base = OTHER; note = 2'-deoxy-2'-fluorouridine-3'-phosphate
  modified_base 9: mod_base = OTHER; note = 2'-deoxy-2'-fluorocytidine-3'-phosphate
  modified_base 10: mod_base = OTHER; note = 2'-O-methylguanosine-3'-phosphate
  modified_base 11: mod_base = OTHER; note = 2'-O-methyluridine-3'-phosphate
  modified_base 12: mod_base = OTHER; note = 2'-O-methyladenosine-3'-phosphate
  modified_base 13: mod_base = OTHER; note = 2'-O-methylguanosine-3'-phosphate
  modified_base 14: mod_base = OTHER; note = 2'-deoxy-2'-fluorouridine-3'-phosphate
  modified_base 15: mod_base = OTHER; note = 2'-O-methylguanosine-3'-phosphate
  modified_base 16: mod_base = OTHER; note = 2'-deoxy-2'-fluoroguanosine-3'-phosphate
  modified_base 17: mod_base = OTHER; note = 2'-O-methyladenosine-3'-phosphate
  modified_base 18: mod_base = OTHER; note = 2'-O-methyladenosine-3'-phosphate
  modified_base 19: mod_base = OTHER; note = 2'-O-methylguanosine-3'-phosphate
  modified_base 20: mod_base = OTHER; note = 2'-O-methyladenosine-3'-phosphate
  modified_base 21: mod_base = OTHER; note = 2'-O-methylguanosine-3'-phosphorothioate
  modified_base 22: mod_base = OTHER; note = 2'-O-methylguanosine-3'-phosphorothioate
  modified_base 23: mod_base = OTHER; note = 2'-O-methyluridine
tatgctgtcgtagtggaagaggt

SEQ ID NO: 470 - RNA, 23 nt, synthetic construct
  source 1..23: mol_type = other RNA
  modified_base 1: mod_base = OTHER; note = 2'-O-methyluridine-3'-phosphorothioate 5'-(E)-Vinylphosphonate
  modified_base 2: mod_base = OTHER; note = 2'-deoxy-2'-fluorocytidine-3'-phosphorothioate
  modified_base 3: mod_base = OTHER; note = 2'-O-methyladenosine-3'-phosphate
  modified_base 4: mod_base = OTHER; note = 2'-O-methylguanosine-3'-phosphate
  modified_base 5: mod_base = OTHER; note = 2'-O-methyluridine-3'-phosphate
  modified_base 6: mod_base = OTHER; note = 2'-deoxy-2'-fluorouridine-3'-phosphate
  modified_base 7: mod_base = OTHER; note = 2'-O-methylguanosine-3'-phosphate
  modified_base 8: mod_base = OTHER; note = 2'-deoxy-2'-fluoroadenosine-3'-phosphate
  modified_base 9: mod_base = OTHER; note = 2'-deoxy-2'-fluorocytidine-3'-phosphate
  modified_base 10: mod_base = OTHER; note = 2'-O-methyluridine-3'-phosphate
  modified_base 11: mod_base = OTHER; note = 2'-O-methylguanosine-3'-phosphate
  modified_base 12: mod_base = OTHER; note = 2'-O-methylcytidine-3'-phosphate
  modified_base 13: mod_base = OTHER; note = 2'-O-methylguanosine-3'-phosphate
  modified_base 14: mod_base = OTHER; note = 2'-deoxy-2'-fluorouridine-3'-phosphate
  modified_base 15: mod_base = OTHER; note = 2'-O-methyluridine-3'-phosphate
  modified_base 16: mod_base = OTHER; note = 2'-deoxy-2'-fluorocytidine-3'-phosphate
  modified_base 17: mod_base = OTHER; note = 2'-O-methyladenosine-3'-phosphate
  modified_base 18: mod_base = OTHER; note = 2'-O-methyluridine-3'-phosphate
  modified_base 19: mod_base = OTHER; note = 2'-O-methylguanosine-3'-phosphate
  modified_base 20: mod_base = OTHER; note = 2'-O-methylcytidine-3'-phosphate
  modified_base 21: mod_base = OTHER; note = 2'-O-methyluridine-3'-phosphorothioate
  modified_base 22: mod_base = OTHER; note = 2'-O-methylguanosine-3'-phosphorothioate
  modified_base 23: mod_base = OTHER; note = 2'-O-methyluridine
tcagttgactgcgttcatgctgt

SEQ ID NO: 471 - RNA, 23 nt, synthetic construct
  source 1..23: mol_type = other RNA
  modified_base 1: mod_base = OTHER; note = 2'-O-methyluridine-3'-phosphorothioate 5'-(E)-Vinylphosphonate
  modified_base 2: mod_base = OTHER; note = 2'-deoxy-2'-fluorouridine-3'-phosphorothioate
  modified_base 3: mod_base = OTHER; note = 2'-O-methyluridine-3'-phosphate
  modified_base 4: mod_base = OTHER; note = 2'-O-methylcytidine-3'-phosphate
  modified_base 5: mod_base = OTHER; note = 2'-O-methyladenosine-3'-phosphate
  modified_base 6: mod_base = OTHER; note = 2'-deoxy-2'-fluorouridine-3'-phosphate
  modified_base 7: mod_base = OTHER; note = 2'-O-methyladenosine-3'-phosphate
  modified_base 8: mod_base = OTHER; note = 2'-deoxy-2'-fluoroadenosine-3'-phosphate
  modified_base 9: mod_base = OTHER; note = 2'-deoxy-2'-fluoroguanosine-3'-phosphate
  modified_base 10: mod_base = OTHER; note = 2'-O-methylguanosine-3'-phosphate
  modified_base 11: mod_base = OTHER; note = 2'-O-methylguanosine-3'-phosphate
  modified_base 12: mod_base = OTHER; note = 2'-O-methyluridine-3'-phosphate
  modified_base 13: mod_base = OTHER; note = 2'-O-methyladenosine-3'-phosphate
  modified_base 14: mod_base = OTHER; note = 2'-deoxy-2'-fluoroguanosine-3'-phosphate
  modified_base 15: mod_base = OTHER; note = 2'-O-methyladenosine-3'-phosphate
  modified_base 16: mod_base = OTHER; note = 2'-deoxy-2'-fluorouridine-3'-phosphate
  modified_base 17: mod_base = OTHER; note = 2'-O-methylcytidine-3'-phosphate
  modified_base 18: mod_base = OTHER; note = 2'-O-methyluridine-3'-phosphate
  modified_base 19: mod_base = OTHER; note = 2'-O-methyluridine-3'-phosphate
  modified_base 20: mod_base = OTHER; note = 2'-O-methylguanosine-3'-phosphate
  modified_base 21: mod_base = OTHER; note = 2'-O-methyluridine-3'-phosphorothioate
  modified_base 22: mod_base = OTHER; note = 2'-O-methyladenosine-3'-phosphorothioate
  modified_base 23: mod_base = OTHER; note = 2'-O-methylcytidine
tttcataagggtagatcttgtac

SEQ ID NO: 472 - RNA, 23 nt, synthetic construct
  source 1..23: mol_type = other RNA
  modified_base 1: mod_base = OTHER; note = 2'-O-methyluridine-3'-phosphorothioate 5'-(E)-Vinylphosphonate
  modified_base 2: mod_base = OTHER; note = 2'-deoxy-2'-fluorouridine-3'-phosphorothioate
  modified_base 3: mod_base = OTHER; note = 2'-O-methylcytidine-3'-phosphate
  modified_base 4: mod_base = OTHER; note = 2'-O-methyluridine-3'-phosphate
  modified_base 5: mod_base = OTHER; note = 2'-O-methyluridine-3'-phosphate
  modified_base 6: mod_base = OTHER; note = 2'-deoxy-2'-fluorocytidine-3'-phosphate
  modified_base 7: mod_base = OTHER; note = 2'-O-methylcytidine-3'-phosphate
  modified_base 8: mod_base = OTHER; note = 2'-deoxy-2'-fluorouridine-3'-phosphate
  modified_base 9: mod_base = OTHER; note = 2'-deoxy-2'-fluorocytidine-3'-phosphate
  modified_base 10: mod_base = OTHER; note = 2'-O-methyluridine-3'-phosphate
  modified_base 11: mod_base = OTHER; note = 2'-O-methyluridine-3'-phosphate
  modified_base 12: mod_base = OTHER; note = 2'-O-methylguanosine-3'-phosphate
  modified_base 13: mod_base = OTHER; note = 2'-O-methyluridine-3'-phosphate
  modified_base 14: mod_base = OTHER; note = 2'-deoxy-2'-fluoroadenosine-3'-phosphate
  modified_base 15: mod_base = OTHER; note = 2'-O-methylguanosine-3'-phosphate
  modified_base 16: mod_base = OTHER; note = 2'-deoxy-2'-fluorouridine-3'-phosphate
  modified_base 17: mod_base = OTHER; note = 2'-O-methylcytidine-3'-phosphate
  modified_base 18: mod_base = OTHER; note = 2'-O-methyladenosine-3'-phosphate
  modified_base 19: mod_base = OTHER; note = 2'-O-methylcytidine-3'-phosphate
  modified_base 20: mod_base = OTHER; note = 2'-O-methylcytidine-3'-phosphate
  modified_base 21: mod_base = OTHER; note = 2'-O-methyladenosine-3'-phosphorothioate
  modified_base 22: mod_base = OTHER; note = 2'-O-methylguanosine-3'-phosphorothioate
  modified_base 23: mod_base = OTHER; note = 2'-O-methylcytidine
ttcttcctcttgtagtcaccagc

SEQ ID NO: 473 - RNA, 23 nt, synthetic construct
  source 1..23: mol_type = other RNA
  modified_base 1: mod_base = OTHER; note = 2'-O-methyluridine-3'-phosphorothioate 5'-(E)-Vinylphosphonate
  modified_base 2: mod_base = OTHER; note = 2'-deoxy-2'-fluorouridine-3'-phosphorothioate
  modified_base 3: mod_base = OTHER; note = 2'-O-methylcytidine-3'-phosphate
  modified_base 4: mod_base = OTHER; note = 2'-O-methylcytidine-3'-phosphate
  modified_base 5: mod_base = OTHER; note = 2'-O-methyluridine-3'-phosphate
  modified_base 6: mod_base = OTHER; note = 2'-deoxy-2'-fluoroguanosine-3'-phosphate
  modified_base 7: mod_base = OTHER; note = 2'-O-methyluridine-3'-phosphate
  modified_base 8: mod_base = OTHER; note = 2'-deoxy-2'-fluorocytidine-3'-phosphate
  modified_base 9: mod_base = OTHER; note = 2'-deoxy-2'-fluorouridine-3'-phosphate
  modified_base 10: mod_base = OTHER; note = 2'-O-methyladenosine-3'-phosphate
  modified_base 11: mod_base = OTHER; note = 2'-O-methylcytidine-3'-phosphate
  modified_base 12: mod_base = OTHER; note = 2'-O-methyladenosine-3'-phosphate
  modified_base 13: mod_base = OTHER; note = 2'-O-methyluridine-3'-phosphate
  modified_base 14: mod_base = OTHER; note = 2'-deoxy-2'-fluorocytidine-3'-phosphate
  modified_base 15: mod_base = OTHER; note = 2'-O-methylcytidine-3'-phosphate
  modified_base 16: mod_base = OTHER; note = 2'-deoxy-2'-fluorouridine-3'-phosphate
  modified_base 17: mod_base = OTHER; note = 2'-O-methyluridine-3'-phosphate
  modified_base 18: mod_base = OTHER; note = 2'-O-methylguanosine-3'-phosphate
  modified_base 19: mod_base = OTHER; note = 2'-O-methylguanosine-3'-phosphate
  modified_base 20: mod_base = OTHER; note = 2'-O-methylguanosine-3'-phosphate
  modified_base 21: mod_base = OTHER; note = 2'-O-methylcytidine-3'-phosphorothioate
  modified_base 22: mod_base = OTHER; note = 2'-O-methyladenosine-3'-phosphorothioate
  modified_base 23: mod_base = OTHER; note = 2'-O-methylguanosine
ttcctgtctacatccttgggcag

SEQ ID NO: 474 - RNA, 23 nt, synthetic construct
  source 1..23: mol_type = other RNA
  modified_base 1: mod_base = OTHER; note = 2'-O-methyluridine-3'-phosphorothioate 5'-(E)-Vinylphosphonate
  modified_base 2: mod_base = OTHER; note = 2'-deoxy-2'-fluoroadenosine-3'-phosphorothioate
  modified_base 3: mod_base = OTHER; note = 2'-O-methyluridine-3'-phosphate
  modified_base 4: mod_base = OTHER; note = 2'-O-methylguanosine-3'-phosphate
  modified_base 5: mod_base = OTHER; note = 2'-O-methylcytidine-3'-phosphate
  modified_base 6: mod_base = OTHER; note = 2'-deoxy-2'-fluorocytidine-3'-phosphate
  modified_base 7: mod_base = OTHER; note = 2'-O-methyladenosine-3'-phosphate
  modified_base 8: mod_base = OTHER; note = 2'-deoxy-2'-fluoroadenosine-3'-phosphate
  modified_base 9: mod_base = OTHER; note = 2'-deoxy-2'-fluoroadenosine-3'-phosphate
  modified_base 10: mod_base = OTHER; note = 2'-O-methylguanosine-3'-phosphate
  modified_base 11: mod_base = OTHER; note = 2'-O-methyladenosine-3'-phosphate
  modified_base 12: mod_base = OTHER; note = 2'-O-methylcytidine-3'-phosphate
  modified_base 13: mod_base = OTHER; note = 2'-O-methyluridine-3'-phosphate
  modified_base 14: mod_base = OTHER; note = 2'-deoxy-2'-fluorouridine-3'-phosphate
  modified_base 15: mod_base = OTHER; note = 2'-O-methylguanosine-3'-phosphate
  modified_base 16: mod_base = OTHER; note = 2'-deoxy-2'-fluoroguanosine-3'-phosphate
  modified_base 17: mod_base = OTHER; note = 2'-O-methyluridine-3'-phosphate
  modified_base 18: mod_base = OTHER; note = 2'-O-methyladenosine-3'-phosphate
  modified_base 19: mod_base = OTHER; note = 2'-O-methylguanosine-3'-phosphate
  modified_base 20: mod_base = OTHER; note = 2'-O-methyladenosine-3'-phosphate
  modified_base 21: mod_base = OTHER; note = 2'-O-methyladenosine-3'-phosphorothioate
  modified_base 22: mod_base = OTHER; note = 2'-O-methylcytidine-3'-phosphorothioate
  modified_base 23: mod_base = OTHER; note = 2'-O-methyluridine
tatgccaaagacttggtagaact

SEQ ID NO: 475 - RNA, 23 nt, synthetic construct
  source 1..23: mol_type = other RNA
  modified_base 1: mod_base = OTHER; note = 2'-O-methyluridine-3'-phosphorothioate 5'-(E)-Vinylphosphonate
  modified_base 2: mod_base = OTHER; note = 2'-deoxy-2'-fluorouridine-3'-phosphorothioate
  modified_base 3: mod_base = OTHER; note = 2'-O-methylcytidine-3'-phosphate
  modified_base 4: mod_base = OTHER; note = 2'-O-methyladenosine-3'-phosphate
  modified_base 5: mod_base = OTHER; note = 2'-O-methyladenosine-3'-phosphate
  modified_base 6: mod_base = OTHER; note = 2'-deoxy-2'-fluoroadenosine-3'-phosphate
  modified_base 7: mod_base = OTHER; note = 2'-O-methylcytidine-3'-phosphate
  modified_base 8: mod_base = OTHER; note = 2'-deoxy-2'-fluorouridine-3'-phosphate
  modified_base 9: mod_base = OTHER; note = 2'-deoxy-2'-fluorocytidine-3'-phosphate
  modified_base 10: mod_base = OTHER; note = 2'-O-methyladenosine-3'-phosphate
  modified_base 11: mod_base = OTHER; note = 2'-O-methylguanosine-3'-phosphate
  modified_base 12: mod_base = OTHER; note = 2'-O-methyladenosine-3'-phosphate
  modified_base 13: mod_base = OTHER; note = 2'-O-methylguanosine-3'-phosphate
  modified_base 14: mod_base = OTHER; note = 2'-deoxy-2'-fluoroadenosine-3'-phosphate
  modified_base 15: mod_base = OTHER; note = 2'-O-methyluridine-3'-phosphate
  modified_base 16: mod_base = OTHER; note = 2'-deoxy-2'-fluoroguanosine-3'-phosphate
  modified_base 17: mod_base = OTHER; note = 2'-O-methylguanosine-3'-phosphate
  modified_base 18: mod_base = OTHER; note = 2'-O-methyluridine-3'-phosphate
  modified_base 19: mod_base = OTHER; note = 2'-O-methylcytidine-3'-phosphate
  modified_base 20: mod_base = OTHER; note = 2'-O-methyladenosine-3'-phosphate
  modified_base 21: mod_base = OTHER; note = 2'-O-methyluridine-3'-phosphorothioate
  modified_base 22: mod_base = OTHER; note = 2'-O-methylguanosine-3'-phosphorothioate
  modified_base 23: mod_base = OTHER; note = 2'-O-methylcytidine
ttcaaactcagagatggtcatgc

SEQ ID NO: 476 - RNA, 23 nt, synthetic construct
  source 1..23: mol_type = other RNA
  modified_base 1: mod_base = OTHER; note = 2'-O-methyluridine-3'-phosphorothioate 5'-(E)-Vinylphosphonate
  modified_base 2: mod_base = OTHER; note = 2'-deoxy-2'-fluoroguanosine-3'-phosphorothioate
  modified_base 3: mod_base = OTHER; note = 2'-O-methylcytidine-3'-phosphate
  modified_base 4: mod_base = OTHER; note = 2'-O-methyluridine-3'-phosphate
  modified_base 5: mod_base = OTHER; note = 2'-O-methyluridine-3'-phosphate
  modified_base 6: mod_base = OTHER; note = 2'-deoxy-2'-fluoroguanosine-3'-phosphate
  modified_base 7: mod_base = OTHER; note = 2'-O-methylcytidine-3'-phosphate
  modified_base 8: mod_base = OTHER; note = 2'-deoxy-2'-fluorouridine-3'-phosphate
  modified_base 9: mod_base = OTHER; note = 2'-deoxy-2'-fluorouridine-3'-phosphate
  modified_base 10: mod_base = OTHER; note = 2'-O-methylcytidine-3'-phosphate
  modified_base 11: mod_base = OTHER; note = 2'-O-methyluridine-3'-phosphate
  modified_base 12: mod_base = OTHER; note = 2'-O-methyluridine-3'-phosphate
  modified_base 13: mod_base = OTHER; note = 2'-O-methylcytidine-3'-phosphate
  modified_base 14: mod_base = OTHER; note = 2'-deoxy-2'-fluoroadenosine-3'-phosphate
  modified_base 15: mod_base = OTHER; note = 2'-O-methylguanosine-3'-phosphate
  modified_base 16: mod_base = OTHER; note = 2'-deoxy-2'-fluorouridine-3'-phosphate
  modified_base 17: mod_base = OTHER; note = 2'-O-methyluridine-3'-phosphate
  modified_base 18: mod_base = OTHER; note = 2'-O-methylcytidine-3'-phosphate
  modified_base 19: mod_base = OTHER; note = 2'-O-methyladenosine-3'-phosphate
  modified_base 20: mod_base = OTHER; note = 2'-O-methyluridine-3'-phosphate
  modified_base 21: mod_base = OTHER; note = 2'-O-methyluridine-3'-phosphorothioate
  modified_base 22: mod_base = OTHER; note = 2'-O-methylcytidine-3'-phosphorothioate
  modified_base 23: mod_base = OTHER; note = 2'-O-methylcytidine
tgcttgcttcttcagttcattcc

SEQ ID NO: 477 - RNA, 23 nt, synthetic construct
  source 1..23: mol_type = other RNA
  modified_base 1: mod_base = OTHER; note = 2'-O-methyluridine-3'-phosphorothioate 5'-(E)-Vinylphosphonate
  modified_base 2: mod_base = OTHER; note = 2'-deoxy-2'-fluorocytidine-3'-phosphorothioate
  modified_base 3: mod_base = OTHER; note = 2'-O-methyladenosine-3'-phosphate
  modified_base 4: mod_base = OTHER; note = 2'-O-methyluridine-3'-phosphate
  modified_base 5: mod_base = OTHER; note = 2'-O-methyladenosine-3'-phosphate
  modified_base 6: mod_base = OTHER; note = 2'-deoxy-2'-fluorouridine-3'-phosphate
  modified_base 7: mod_base = OTHER; note = 2'-O-methyladenosine-3'-phosphate
  modified_base 8: mod_base = OTHER; note = 2'-deoxy-2'-fluorouridine-3'-phosphate
  modified_base 9: mod_base = OTHER; note = 2'-deoxy-2'-fluoroadenosine-3'-phosphate
  modified_base 10: mod_base = OTHER; note = 2'-O-methyluridine-3'-phosphate
  modified_base 11: mod_base = OTHER; note = 2'-O-methyluridine-3'-phosphate
  modified_base 12: mod_base = OTHER; note = 2'-O-methyluridine-3'-phosphate
  modified_base 13: mod_base = OTHER; note = 2'-O-methyladenosine-3'-phosphate
  modified_base 14: mod_base = OTHER; note = 2'-deoxy-2'-fluorouridine-3'-phosphate
  modified_base 15: mod_base = OTHER; note = 2'-O-methyladenosine-3'-phosphate
  modified_base 16: mod_base = OTHER; note = 2'-deoxy-2'-fluoroguanosine-3'-phosphate
  modified_base 17: mod_base = OTHER; note = 2'-O-methyladenosine-3'-phosphate
  modified_base 18: mod_base = OTHER; note = 2'-O-methylguanosine-3'-phosphate
  modified_base 19: mod_base = OTHER; note = 2'-O-methylcytidine-3'-phosphate
  modified_base 20: mod_base = OTHER; note = 2'-O-methylcytidine-3'-phosphate
  modified_base 21: mod_base = OTHER; note = 2'-O-methyluridine-3'-phosphorothioate
  modified_base 22: mod_base = OTHER; note = 2'-O-methylcytidine-3'-phosphorothioate
  modified_base 23: mod_base = OTHER; note = 2'-O-methyluridine
tcatatatatttatagagcctct

SEQ ID NO: 478 - RNA, 23 nt, synthetic construct
  source 1..23: mol_type = other RNA
  modified_base 1: mod_base = OTHER; note = 2'-O-methyluridine-3'-phosphorothioate 5'-(E)-Vinylphosphonate
  modified_base 2: mod_base = OTHER; note = 2'-deoxy-2'-fluorouridine-3'-phosphorothioate
  modified_base 3: mod_base = OTHER; note = 2'-O-methylcytidine-3'-phosphate
  modified_base 4: mod_base = OTHER; note = 2'-O-methyladenosine-3'-phosphate
  modified_base 5: mod_base = OTHER; note = 2'-O-methylguanosine-3'-phosphate
  modified_base 6: mod_base = OTHER; note = 2'-deoxy-2'-fluorouridine-3'-phosphate
  modified_base 7: mod_base = OTHER; note = 2'-O-methyladenosine-3'-phosphate
  modified_base 8: mod_base = OTHER; note = 2'-deoxy-2'-fluoroguanosine-3'-phosphate
  modified_base 9: mod_base = OTHER; note = 2'-deoxy-2'-fluoroadenosine-3'-phosphate
  modified_base 10: mod_base = OTHER; note = 2'-O-methylguanosine-3'-phosphate
  modified_base 11: mod_base = OTHER; note = 2'-O-methyladenosine-3'-phosphate
  modified_base 12: mod_base = OTHER; note = 2'-O-methylguanosine-3'-phosphate
  modified_base 13: mod_base = OTHER; note = 2'-O-methyladenosine-3'-phosphate
  modified_base 14: mod_base = OTHER; note = 2'-deoxy-2'-fluorouridine-3'-phosphate
  modified_base 15: mod_base = OTHER; note = 2'-O-methyluridine-3'-phosphate
  modified_base 16: mod_base = OTHER; note = 2'-deoxy-2'-fluorouridine-3'-phosphate
  modified_base 17: mod_base = OTHER; note = 2'-O-methyluridine-3'-phosphate
  modified_base 18: mod_base = OTHER; note = 2'-O-methyladenosine-3'-phosphate
  modified_base 19: mod_base = OTHER; note = 2'-O-methylcytidine-3'-phosphate
  modified_base 20: mod_base = OTHER; note = 2'-O-methyladenosine-3'-phosphate
  modified_base 21: mod_base = OTHER; note = 2'-O-methyluridine-3'-phosphorothioate
  modified_base 22: mod_base = OTHER; note = 2'-O-methyladenosine-3'-phosphorothioate
  modified_base 23: mod_base = OTHER; note = 2'-O-methyluridine
ttcagtagagagattttacatat

SEQ ID NO: 479 - RNA, 23 nt, synthetic construct
  source 1..23: mol_type = other RNA
  modified_base 1: mod_base = OTHER; note = 2'-O-methyluridine-3'-phosphorothioate 5'-(E)-Vinylphosphonate
  modified_base 2: mod_base = OTHER; note = 2'-deoxy-2'-fluorocytidine-3'-phosphorothioate
  modified_base 3: mod_base = OTHER; note = 2'-O-methyladenosine-3'-phosphate
  modified_base 4: mod_base = OTHER; note = 2'-O-methylcytidine-3'-phosphate
  modified_base 5: mod_base = OTHER; note = 2'-O-methyladenosine-3'-phosphate
  modified_base 6: mod_base = OTHER; note = 2'-deoxy-2'-fluoroadenosine-3'-phosphate
  modified_base 7: mod_base = OTHER; note = 2'-O-methylguanosine-3'-phosphate
  modified_base 8: mod_base = OTHER; note = 2'-deoxy-2'-fluoroadenosine-3'-phosphate
  modified_base 9: mod_base = OTHER; note = 2'-deoxy-2'-fluoroguanosine-3'-phosphate
  modified_base 10: mod_base = OTHER; note = 2'-O-methyladenosine-3'-phosphate
  modified_base 11: mod_base = OTHER; note = 2'-O-methylguanosine-3'-phosphate
  modified_base 12: mod_base = OTHER; note = 2'-O-methylguanosine-3'-phosphate
  modified_base 13: mod_base = OTHER; note = 2'-O-methyladenosine-3'-phosphate
  modified_base 14: mod_base = OTHER; note = 2'-deoxy-2'-fluorouridine-3'-phosphate
  modified_base 15: mod_base = OTHER; note = 2'-O-methyluridine-3'-phosphate
  modified_base 16: mod_base = OTHER; note = 2'-deoxy-2'-fluoroadenosine-3'-phosphate
  modified_base 17: mod_base = OTHER; note = 2'-O-methyluridine-3'-phosphate
  modified_base 18: mod_base = OTHER; note = 2'-O-methyladenosine-3'-phosphate
  modified_base 19: mod_base = OTHER; note = 2'-O-methylcytidine-3'-phosphate
  modified_base 20: mod_base = OTHER; note = 2'-O-methylcytidine-3'-phosphate
  modified_base 21: mod_base = OTHER; note = 2'-O-methylguanosine-3'-phosphorothioate
  modified_base 22: mod_base = OTHER; note = 2'-O-methyladenosine-3'-phosphorothioate
  modified_base 23: mod_base = OTHER; note = 2'-O-methylguanosine
tcacaagagaggattataccgag

SEQ ID NO: 480 - RNA, 23 nt, synthetic construct
  source 1..23: mol_type = other RNA
  modified_base 1: mod_base = OTHER; note = 2'-O-methyluridine-3'-phosphorothioate 5'-(E)-Vinylphosphonate
  modified_base 2: mod_base = OTHER; note = 2'-deoxy-2'-fluoroguanosine-3'-phosphorothioate
  modified_base 3: mod_base = OTHER; note = 2'-O-methyladenosine-3'-phosphate
  modified_base 4: mod_base = OTHER; note = 2'-O-methyladenosine-3'-phosphate
  modified_base 5: mod_base = OTHER; note = 2'-O-methyladenosine-3'-phosphate
  modified_base 6: mod_base = OTHER; note = 2'-deoxy-2'-fluoroadenosine-3'-phosphate
  modified_base 7: mod_base = OTHER; note = 2'-O-methylguanosine-3'-phosphate
  modified_base 8: mod_base = OTHER; note = 2'-deoxy-2'-fluorocytidine-3'-phosphate
  modified_base 9: mod_base = OTHER; note = 2'-deoxy-2'-fluoroadenosine-3'-phosphate
  modified_base 10: mod_base = OTHER; note = 2'-O-methyladenosine-3'-phosphate
  modified_base 11: mod_base = OTHER; note = 2'-O-methylguanosine-3'-phosphate
  modified_base 12: mod_base = OTHER; note = 2'-O-methyluridine-3'-phosphate
  modified_base 13: mod_base = OTHER; note = 2'-O-methylcytidine-3'-phosphate
  modified_base 14: mod_base = OTHER; note = 2'-deoxy-2'-fluorouridine-3'-phosphate
  modified_base 15: mod_base = OTHER; note = 2'-O-methylcytidine-3'-phosphate
  modified_base 16: mod_base = OTHER; note = 2'-deoxy-2'-fluoroadenosine-3'-phosphate
  modified_base 17: mod_base = OTHER; note = 2'-O-methyluridine-3'-phosphate
  modified_base 18: mod_base = OTHER; note = 2'-O-methylguanosine-3'-phosphate
  modified_base 19: mod_base = OTHER; note = 2'-O-methylguanosine-3'-phosphate
  modified_base 20: mod_base = OTHER; note = 2'-O-methylcytidine-3'-phosphate
  modified_base 21: mod_base = OTHER; note = 2'-O-methyladenosine-3'-phosphorothioate
  modified_base 22: mod_base = OTHER; note = 2'-O-methylguanosine-3'-phosphorothioate
  modified_base 23: mod_base = OTHER; note = 2'-O-methylguanosine
tgaaaagcaagtctcatggcagg

SEQ ID NO: 481 - RNA, 23 nt, synthetic construct
  source 1..23: mol_type = other RNA
  modified_base 1: mod_base = OTHER; note = 2'-O-methyluridine-3'-phosphorothioate 5'-(E)-Vinylphosphonate
  modified_base 2: mod_base = OTHER; note = 2'-deoxy-2'-fluorouridine-3'-phosphorothioate
  modified_base 3: mod_base = OTHER; note = 2'-O-methyluridine-3'-phosphate
  modified_base 4: mod_base = OTHER; note = 2'-O-methylguanosine-3'-phosphate
  modified_base 5: mod_base = OTHER; note = 2'-O-methylcytidine-3'-phosphate
  modified_base 6: mod_base = OTHER; note = 2'-deoxy-2'-fluorocytidine-3'-phosphate
  modified_base 7: mod_base = OTHER; note = 2'-O-methyluridine-3'-phosphate
  modified_base 8: mod_base = OTHER; note = 2'-deoxy-2'-fluoroguanosine-3'-phosphate
  modified_base 9: mod_base = OTHER; note = 2'-deoxy-2'-fluoroadenosine-3'-phosphate
  modified_base 10: mod_base = OTHER; note = 2'-O-methylcytidine-3'-phosphate
  modified_base 11: mod_base = OTHER; note = 2'-O-methyladenosine-3'-phosphate
  modified_base 12: mod_base = OTHER; note = 2'-O-methylguanosine-3'-phosphate
  modified_base 13: mod_base = OTHER; note = 2'-O-methyluridine-3'-phosphate
  modified_base 14: mod_base = OTHER; note = 2'-deoxy-2'-fluoroadenosine-3'-phosphate
  modified_base 15: mod_base = OTHER; note = 2'-O-methylcytidine-3'-phosphate
  modified_base 16: mod_base = OTHER; note = 2'-deoxy-2'-fluoroadenosine-3'-phosphate
  modified_base 17: mod_base = OTHER; note = 2'-O-methylguanosine-3'-phosphate
  modified_base 18: mod_base = OTHER; note = 2'-O-methyladenosine-3'-phosphate
  modified_base 19: mod_base = OTHER; note = 2'-O-methyladenosine-3'-phosphate
  modified_base 20: mod_base = OTHER; note = 2'-O-methyladenosine-3'-phosphate
  modified_base 21: mod_base = OTHER; note = 2'-O-methyladenosine-3'-phosphorothioate
  modified_base 22: mod_base = OTHER; note = 2'-O-methylguanosine-3'-phosphorothioate
  modified_base 23: mod_base = OTHER; note = 2'-O-methylcytidine
tttgcctgacagtacagaaaagc

SEQ ID NO: 482 - RNA, 23 nt, synthetic construct
  source 1..23: mol_type = other RNA
  modified_base 1: mod_base = OTHER; note = 2'-O-methyluridine-3'-phosphorothioate 5'-(E)-Vinylphosphonate
  modified_base 2: mod_base = OTHER; note = 2'-deoxy-2'-fluorocytidine-3'-phosphorothioate
  modified_base 3: mod_base = OTHER; note = 2'-O-methyladenosine-3'-phosphate
  modified_base 4: mod_base = OTHER; note = 2'-O-methyluridine-3'-phosphate
  modified_base 5: mod_base = OTHER; note = 2'-O-methyladenosine-3'-phosphate
  modified_base 6: mod_base = OTHER; note = 2'-deoxy-2'-fluoroadenosine-3'-phosphate
  modified_base 7: mod_base = OTHER; note = 2'-O-methyladenosine-3'-phosphate
  modified_base 8: mod_base = OTHER; note = 2'-deoxy-2'-fluoroadenosine-3'-phosphate
  modified_base 9: mod_base = OTHER; note = 2'-deoxy-2'-fluoroadenosine-3'-phosphate
  modified_base 10: mod_base = OTHER; note = 2'-O-methyluridine-3'-phosphate
  modified_base 11: mod_base = OTHER; note = 2'-O-methyladenosine-3'-phosphate
  modified_base 12: mod_base = OTHER; note = 2'-O-methyluridine-3'-phosphate
  modified_base 13: mod_base = OTHER; note = 2'-O-methylcytidine-3'-phosphate
  modified_base 14: mod_base = OTHER; note = 2'-deoxy-2'-fluorouridine-3'-phosphate
  modified_base 15: mod_base = OTHER; note = 2'-O-methylcytidine-3'-phosphate
  modified_base 16: mod_base = OTHER; note = 2'-deoxy-2'-fluoroguanosine-3'-phosphate
  modified_base 17: mod_base = OTHER; note = 2'-O-methyladenosine-3'-phosphate
  modified_base 18: mod_base = OTHER; note = 2'-O-methyluridine-3'-phosphate
  modified_base 19: mod_base = OTHER; note = 2'-O-methylguanosine-3'-phosphate
  modified_base 20: mod_base = OTHER; note = 2'-O-methyladenosine-3'-phosphate
  modified_base 21: mod_base = OTHER; note = 2'-O-methylcytidine-3'-phosphorothioate
  modified_base 22: mod_base = OTHER; note = 2'-O-methylguanosine-3'-phosphorothioate
  modified_base 23: mod_base = OTHER; note = 2'-O-methyluridine
tcataaaaatatctcgatgacgt

SEQ ID NO: 483 - RNA, 23 nt, synthetic construct
  source 1..23: mol_type = other RNA
  modified_base 1: mod_base = OTHER; note = 2'-O-methyluridine-3'-phosphorothioate 5'-(E)-Vinylphosphonate
  modified_base 2: mod_base = OTHER; note = 2'-deoxy-2'-fluoroadenosine-3'-phosphorothioate
  modified_base 3: mod_base = OTHER; note = 2'-O-methylcytidine-3'-phosphate
  modified_base 4: mod_base = OTHER; note = 2'-O-methyluridine-3'-phosphate
  modified_base 5: mod_base = OTHER; note = 2'-O-methyluridine-3'-phosphate
  modified_base 6: mod_base = OTHER; note = 2'-deoxy-2'-fluoroadenosine-3'-phosphate
  modified_base 7: mod_base = OTHER; note = 2'-O-methylguanosine-3'-phosphate
  modified_base 8: mod_base = OTHER; note = 2'-deoxy-2'-fluoroadenosine-3'-phosphate
  modified_base 9: mod_base = OTHER; note = 2'-deoxy-2'-fluoroadenosine-3'-phosphate
  modified_base 10: mod_base = OTHER; note = 2'-O-methyladenosine-3'-phosphate
  modified_base 11: mod_base = OTHER; note = 2'-O-methyladenosine-3'-phosphate
  modified_base 12: mod_base = OTHER; note = 2'-O-methylguanosine-3'-phosphate
  modified_base 13: mod_base = OTHER; note = 2'-O-methyladenosine-3'-phosphate
  modified_base 14: mod_base = OTHER; note = 2'-deoxy-2'-fluoroguanosine-3'-phosphate
  modified_base 15: mod_base = OTHER; note = 2'-O-methyladenosine-3'-phosphate
  modified_base 16: mod_base = OTHER; note = 2'-deoxy-2'-fluoroadenosine-3'-phosphate
  modified_base 17: mod_base = OTHER; note = 2'-O-methyladenosine-3'-phosphate
  modified_base 18: mod_base = OTHER; note = 2'-O-methylguanosine-3'-phosphate
  modified_base 19: mod_base = OTHER; note = 2'-O-methyluridine-3'-phosphate
  modified_base 20: mod_base = OTHER; note = 2'-O-methyladenosine-3'-phosphate
  modified_base 21: mod_base = OTHER; note = 2'-O-methyladenosine-3'-phosphorothioate
  modified_base 22: mod_base = OTHER; note = 2'-O-methylguanosine-3'-phosphorothioate
  modified_base 23: mod_base = OTHER; note = 2'-O-methylguanosine
tacttagaaaagagaaagtaagg

SEQ ID NO: 484 - RNA, 23 nt, synthetic construct
  source 1..23: mol_type = other RNA
  modified_base 1: mod_base = OTHER; note = 2'-O-methyluridine-3'-phosphorothioate 5'-(E)-Vinylphosphonate
  modified_base 2: mod_base = OTHER; note = 2'-deoxy-2'-fluoroadenosine-3'-phosphorothioate
  modified_base 3: mod_base = OTHER; note = 2'-O-methylguanosine-3'-phosphate
  modified_base 4: mod_base = OTHER; note = 2'-O-methyluridine-3'-phosphate
  modified_base 5: mod_base = OTHER; note = 2'-O-methyluridine-3'-phosphate
  modified_base 6: mod_base = OTHER; note = 2'-deoxy-2'-fluoroadenosine-3'-phosphate
  modified_base 7: mod_base = OTHER; note = 2'-O-methylguanosine-3'-phosphate
  modified_base 8: mod_base = OTHER; note = 2'-deoxy-2'-fluoroguanosine-3'-phosphate
  modified_base 9: mod_base = OTHER; note = 2'-deoxy-2'-fluoroadenosine-3'-phosphate
  modified_base 10: mod_base = OTHER; note = 2'-O-methylcytidine-3'-phosphate
  modified_base 11: mod_base = OTHER; note = 2'-O-methyladenosine-3'-phosphate
  modified_base 12: mod_base = OTHER; note = 2'-O-methylguanosine-3'-phosphate
  modified_base 13: mod_base = OTHER; note = 2'-O-methyladenosine-3'-phosphate
  modified_base 14: mod_base = OTHER; note = 2'-deoxy-2'-fluorouridine-3'-phosphate
  modified_base 15: mod_base = OTHER; note = 2'-O-methylguanosine-3'-phosphate
  modified_base 16: mod_base = OTHER; note = 2'-deoxy-2'-fluorouridine-3'-phosphate
  modified_base 17: mod_base = OTHER; note = 2'-O-methyluridine-3'-phosphate
  modified_base 18: mod_base = OTHER; note = 2'-O-methyluridine-3'-phosphate
  modified_base 19: mod_base = OTHER; note = 2'-O-methylcytidine-3'-phosphate
  modified_base 20: mod_base = OTHER; note = 2'-O-methyladenosine-3'-phosphate
  modified_base 21: mod_base = OTHER; note = 2'-O-methylguanosine-3'-phosphorothioate
  modified_base 22: mod_base = OTHER; note = 2'-O-methyluridine-3'-phosphorothioate
  modified_base 23: mod_base = OTHER; note = 2'-O-methyladenosine
tagttaggacagatgtttcagta

SEQ ID NO: 485 - RNA, 23 nt, synthetic construct
  source 1..23: mol_type = other RNA
  modified_base 1: mod_base = OTHER; note = 2'-O-methyluridine-3'-phosphorothioate 5'-(E)-Vinylphosphonate
  modified_base 2: mod_base = OTHER; note = 2'-deoxy-2'-fluorouridine-3'-phosphorothioate
  modified_base 3: mod_base = OTHER; note = 2'-O-methyluridine-3'-phosphate
  modified_base 4: mod_base = OTHER; note = 2'-O-methylcytidine-3'-phosphate
  modified_base 5: mod_base = OTHER; note = 2'-O-methyluridine-3'-phosphate
  modified_base 6: mod_base = OTHER; note = 2'-deoxy-2'-fluorouridine-3'-phosphate
  modified_base 7: mod_base = OTHER; note = 2'-O-methyluridine-3'-phosphate
  modified_base 8: mod_base = OTHER; note = 2'-deoxy-2'-fluoroadenosine-3'-phosphate
  modified_base 9: mod_base = OTHER; note = 2'-deoxy-2'-fluoroguanosine-3'-phosphate
  modified_base 10: mod_base = OTHER; note = 2'-O-methylguanosine-3'-phosphate
  modified_base 11: mod_base = OTHER; note = 2'-O-methyladenosine-3'-phosphate
  modified_base 12: mod_base = OTHER; note = 2'-O-methyladenosine-3'-phosphate
  modified_base 13: mod_base = OTHER; note = 2'-O-methyladenosine-3'-phosphate
  modified_base 14: mod_base = OTHER; note = 2'-deoxy-2'-fluoroguanosine-3'-phosphate
  modified_base 15: mod_base = OTHER; note = 2'-O-methyladenosine-3'-phosphate
  modified_base 16: mod_base = OTHER; note = 2'-deoxy-2'-fluoroguanosine-3'-phosphate
  modified_base 17: mod_base = OTHER; note = 2'-O-methyladenosine-3'-phosphate
  modified_base 18: mod_base = OTHER; note = 2'-O-methylguanosine-3'-phosphate
  modified_base 19: mod_base = OTHER; note = 2'-O-methyluridine-3'-phosphate
  modified_base 20: mod_base = OTHER; note = 2'-O-methyluridine-3'-phosphate
  modified_base 21: mod_base = OTHER; note = 2'-O-methylguanosine-3'-phosphorothioate
  modified_base 22: mod_base = OTHER; note = 2'-O-methylguanosine-3'-phosphorothioate
  modified_base 23: mod_base = OTHER; note = 2'-O-methyladenosine
tttctttaggaaagagagttgga

SEQ ID NO: 486 - RNA, 23 nt, synthetic construct
  source 1..23: mol_type = other RNA
  modified_base 1: mod_base = OTHER; note = 2'-O-methyluridine-3'-phosphorothioate 5'-(E)-Vinylphosphonate
  modified_base 2: mod_base = OTHER; note = 2'-deoxy-2'-fluoroadenosine-3'-phosphorothioate
  modified_base 3: mod_base = OTHER; note = 2'-O-methylguanosine-3'-phosphate
  modified_base 4: mod_base = OTHER; note = 2'-O-methyladenosine-3'-phosphate
  modified_base 5: mod_base = OTHER; note = 2'-O-methylguanosine-3'-phosphate
  modified_base 6: mod_base = OTHER; note = 2'-deoxy-2'-fluoroadenosine-3'-phosphate
  modified_base 7: mod_base = OTHER; note = 2'-O-methyladenosine-3'-phosphate
  modified_base 8: mod_base = OTHER; note = 2'-deoxy-2'-fluoroguanosine-3'-phosphate
  modified_base 9: mod_base = OTHER; note = 2'-deoxy-2'-fluoroadenosine-3'-phosphate
  modified_base 10: mod_base = OTHER; note = 2'-O-methylguanosine-3'-phosphate
  modified_base 11: mod_base = OTHER; note = 2'-O-methyladenosine-3'-phosphate
  modified_base 12: mod_base = OTHER; note = 2'-O-methylguanosine-3'-phosphate
  modified_base 13: mod_base = OTHER; note = 2'-O-methyladenosine-3'-phosphate
  modified_base 14: mod_base = OTHER; note = 2'-deoxy-2'-fluorocytidine-3'-phosphate
  modified_base 15: mod_base = OTHER; note = 2'-O-methyluridine-3'-phosphate
  modified_base 16: mod_base = OTHER; note = 2'-deoxy-2'-fluorouridine-3'-phosphate
  modified_base 17: mod_base = OTHER; note = 2'-O-methylcytidine-3'-phosphate
  modified_base 18: mod_base = OTHER; note = 2'-O-methyluridine-3'-phosphate
  modified_base 19: mod_base = OTHER; note = 2'-O-methyluridine-3'-phosphate
  modified_base 20: mod_base = OTHER; note = 2'-O-methylcytidine-3'-phosphate
  modified_base 21: mod_base = OTHER; note = 2'-O-methyladenosine-3'-phosphorothioate
  modified_base 22: mod_base = OTHER; note = 2'-O-methylguanosine-3'-phosphorothioate
  modified_base 23: mod_base = OTHER; note = 2'-O-methylguanosine
tagagaagagagacttcttcagg

SEQ ID NO: 487 - RNA, 23 nt, synthetic construct
  source 1..23: mol_type = other RNA
  modified_base 1: mod_base = OTHER; note = 2'-O-methyluridine-3'-phosphorothioate 5'-(E)-Vinylphosphonate
  modified_base 2: mod_base = OTHER; note = 2'-deoxy-2'-fluoroadenosine-3'-phosphorothioate
  modified_base 3: mod_base = OTHER; note = 2'-O-methylguanosine-3'-phosphate
  modified_base 4: mod_base = OTHER; note = 2'-O-methylcytidine-3'-phosphate
  modified_base 5: mod_base = OTHER; note = 2'-O-methylcytidine-3'-phosphate
  modified_base 6: mod_base = OTHER; note = 2'-deoxy-2'-fluorocytidine-3'-phosphate
  modified_base 7: mod_base = OTHER; note = 2'-O-methyluridine-3'-phosphate
  modified_base 8: mod_base = OTHER; note = 2'-deoxy-2'-fluoroadenosine-3'-phosphate
  modified_base 9: mod_base = OTHER; note = 2'-deoxy-2'-fluoroguanosine-3'-phosphate
  modified_base 10: mod_base = OTHER; note = 2'-O-methyladenosine-3'-phosphate
  modified_base 11: mod_base = OTHER; note = 2'-O-methyladenosine-3'-phosphate
  modified_base 12: mod_base = OTHER; note = 2'-O-methyladenosine-3'-phosphate
  modified_base 13: mod_base = OTHER; note = 2'-O-methyluridine-3'-phosphate
  modified_base 14: mod_base = OTHER; note = 2'-deoxy-2'-fluorouridine-3'-phosphate
  modified_base 15: mod_base = OTHER; note = 2'-O-methyluridine-3'-phosphate
  modified_base 16: mod_base = OTHER; note = 2'-deoxy-2'-fluoroadenosine-3'-phosphate
  modified_base 17: mod_base = OTHER; note = 2'-O-methyladenosine-3'-phosphate
  modified_base 18: mod_base = OTHER; note = 2'-O-methylguanosine-3'-phosphate
  modified_base 19: mod_base = OTHER; note = 2'-O-methyladenosine-3'-phosphate
  modified_base 20: mod_base = OTHER; note = 2'-O-methyladenosine-3'-phosphate
  modified_base 21: mod_base = OTHER; note = 2'-O-methyladenosine-3'-phosphorothioate
  modified_base 22: mod_base = OTHER; note = 2'-O-methylguanosine-3'-phosphorothioate
  modified_base 23: mod_base = OTHER; note = 2'-O-methylguanosine
tagccctagaaatttaagaaagg

SEQ ID NO: 488 - RNA, 23 nt, synthetic construct
  source 1..23: mol_type = other RNA
  modified_base 1: mod_base = OTHER; note = 2'-O-methyluridine-3'-phosphorothioate 5'-(E)-Vinylphosphonate
  modified_base 2: mod_base = OTHER; note = 2'-deoxy-2'-fluorouridine-3'-phosphorothioate
  modified_base 3: mod_base = OTHER; note = 2'-O-methylguanosine-3'-phosphate
  modified_base 4: mod_base = OTHER; note = 2'-O-methyluridine-3'-phosphate
  modified_base 5: mod_base = OTHER; note = 2'-O-methylguanosine-3'-phosphate
  modified_base 6: mod_base = OTHER; note = 2'-deoxy-2'-fluoroguanosine-3'-phosphate
  modified_base 7: mod_base = OTHER; note = 2'-O-methyladenosine-3'-phosphate
  modified_base 8: mod_base = OTHER; note = 2'-deoxy-2'-fluoroadenosine-3'-phosphate
  modified_base 9: mod_base = OTHER; note = 2'-deoxy-2'-fluoroadenosine-3'-phosphate
  modified_base 10: mod_base = OTHER; note = 2'-O-methylcytidine-3'-phosphate
  modified_base 11: mod_base = OTHER; note = 2'-O-methylcytidine-3'-phosphate
  modified_base 12: mod_base = OTHER; note = 2'-O-methyladenosine-3'-phosphate
  modified_base 13: mod_base = OTHER; note = 2'-O-methylcytidine-3'-phosphate
  modified_base 14: mod_base = OTHER; note = 2'-deoxy-2'-fluoroadenosine-3'-phosphate
  modified_base 15: mod_base = OTHER; note = 2'-O-methyluridine-3'-phosphate
  modified_base 16: mod_base = OTHER; note = 2'-deoxy-2'-fluoroguanosine-3'-phosphate
  modified_base 17: mod_base = OTHER; note = 2'-O-methylguanosine-3'-phosphate
  modified_base 18: mod_base = OTHER; note = 2'-O-methyluridine-3'-phosphate
  modified_base 19: mod_base = OTHER; note = 2'-O-methylcytidine-3'-phosphate
  modified_base 20: mod_base = OTHER; note = 2'-O-methyladenosine-3'-phosphate
  modified_base 21: mod_base = OTHER; note = 2'-O-methylguanosine-3'-phosphorothioate
  modified_base 22: mod_base = OTHER; note = 2'-O-methylcytidine-3'-phosphorothioate
  modified_base 23: mod_base = OTHER; note = 2'-O-methyladenosine
ttgtggaaaccacatggtcagca

SEQ ID NO: 489 - RNA, 23 nt, synthetic construct
  source 1..23: mol_type = other RNA
  modified_base 1: mod_base = OTHER; note = 2'-O-methyluridine-3'-phosphorothioate 5'-(E)-Vinylphosphonate
  modified_base 2: mod_base = OTHER; note = 2'-deoxy-2'-fluorouridine-3'-phosphorothioate
  modified_base 3: mod_base = OTHER; note = 2'-O-methylguanosine-3'-phosphate
  modified_base 4: mod_base = OTHER; note = 2'-O-methylcytidine-3'-phosphate
  modified_base 5: mod_base = OTHER; note = 2'-O-methyladenosine-3'-phosphate
  modified_base 6: mod_base = OTHER; note = 2'-deoxy-2'-fluoroguanosine-3'-phosphate
  modified_base 7: mod_base = OTHER; note = 2'-O-methyladenosine-3'-phosphate
  modified_base 8: mod_base = OTHER; note = 2'-deoxy-2'-fluorouridine-3'-phosphate
  modified_base 9: mod_base = OTHER; note = 2'-deoxy-2'-fluorocytidine-3'-phosphate
  modified_base 10: mod_base = OTHER; note = 2'-O-methyluridine-3'-phosphate
  modified_base 11: mod_base = OTHER; note = 2'-O-methyluridine-3'-phosphate
  modified_base 12: mod_base = OTHER; note = 2'-O-methylcytidine-3'-phosphate
  modified_base 13: mod_base = OTHER; note = 2'-O-methylcytidine-3'-phosphate
  modified_base 14: mod_base = OTHER; note = 2'-deoxy-2'-fluorocytidine-3'-phosphate
  modified_base 15: mod_base = OTHER; note = 2'-O-methyladenosine-3'-phosphate
  modified_base 16: mod_base = OTHER; note = 2'-deoxy-2'-fluorouridine-3'-phosphate
  modified_base 17: mod_base = OTHER; note = 2'-O-methylguanosine-3'-phosphate
  modified_base 18: mod_base = OTHER; note = 2'-O-methylguanosine-3'-phosphate
  modified_base 19: mod_base = OTHER; note = 2'-O-methylguanosine-3'-phosphate
  modified_base 20: mod_base = OTHER; note = 2'-O-methyladenosine-3'-phosphate
  modified_base 21: mod_base = OTHER; note = 2'-O-methylguanosine-3'-phosphorothioate
  modified_base 22: mod_base = OTHER; note = 2'-O-methylguanosine-3'-phosphorothioate
  modified_base 23: mod_base = OTHER; note = 2'-O-methylguanosine
ttgcagatcttcccatgggaggg

SEQ ID NO: 490 - RNA, 23 nt, synthetic construct
  source 1..23: mol_type = other RNA
  modified_base 1: mod_base = OTHER; note = 2'-O-methyluridine-3'-phosphorothioate 5'-(E)-Vinylphosphonate
  modified_base 2: mod_base = OTHER; note = 2'-deoxy-2'-fluorouridine-3'-phosphorothioate
  modified_base 3: mod_base = OTHER; note = 2'-O-methylcytidine-3'-phosphate
  modified_base 4: mod_base = OTHER; note = 2'-O-methyladenosine-3'-phosphate
  modified_base 5: mod_base = OTHER; note = 2'-O-methyladenosine-3'-phosphate
  modified_base 6: mod_base = OTHER; note = 2'-deoxy-2'-fluoroadenosine-3'-phosphate
  modified_base 7: mod_base = OTHER; note = 2'-O-methylguanosine-3'-phosphate
  modified_base 8: mod_base = OTHER; note = 2'-deoxy-2'-fluoroguanosine-3'-phosphate
  modified_base 9: mod_base = OTHER; note = 2'-deoxy-2'-fluorouridine-3'-phosphate
  modified_base 10: mod_base = OTHER; note = 2'-O-methylguanosine-3'-phosphate
  modified_base 11: mod_base = OTHER; note = 2'-O-methylcytidine-3'-phosphate
  modified_base 12: mod_base = OTHER; note = 2'-O-methyluridine-3'-phosphate
  modified_base 13: mod_base = OTHER; note = 2'-O-methylcytidine-3'-phosphate
  modified_base 14: mod_base = OTHER; note = 2'-deoxy-2'-fluoroadenosine-3'-phosphate
  modified_base 15: mod_base = OTHER; note = 2'-O-methylcytidine-3'-phosphate
  modified_base 16: mod_base = OTHER; note = 2'-deoxy-2'-fluorouridine-3'-phosphate
  modified_base 17: mod_base = OTHER; note = 2'-O-methylguanosine-3'-phosphate
  modified_base 18: mod_base = OTHER; note = 2'-O-methyladenosine-3'-phosphate
  modified_base 19: mod_base = OTHER; note = 2'-O-methyluridine-3'-phosphate
  modified_base 20: mod_base = OTHER; note = 2'-O-methyluridine-3'-phosphate
  modified_base 21: mod_base = OTHER; note = 2'-O-methyluridine-3'-phosphorothioate
  modified_base 22: mod_base = OTHER; note = 2'-O-methylguanosine-3'-phosphorothioate
  modified_base 23: mod_base = OTHER; note = 2'-O-methylguanosine
ttcaaaggtgctcactgatttgg

SEQ ID NO: 491 - RNA, 23 nt, synthetic construct
  source 1..23: mol_type = other RNA
  modified_base 1: mod_base = OTHER; note = 2'-O-methyluridine-3'-phosphorothioate 5'-(E)-Vinylphosphonate
  modified_base 2: mod_base = OTHER; note = 2'-deoxy-2'-fluoroguanosine-3'-phosphorothioate
  modified_base 3: mod_base = OTHER; note = 2'-O-methyluridine-3'-phosphate
  modified_base 4: mod_base = OTHER; note = 2'-O-methyluridine-3'-phosphate
  modified_base 5: mod_base = OTHER; note = 2'-O-methylguanosine-3'-phosphate
  modified_base 6: mod_base = OTHER; note = 2'-deoxy-2'-fluoroadenosine-3'-phosphate
  modified_base 7: mod_base = OTHER; note = 2'-O-methylguanosine-3'-phosphate
  modified_base 8: mod_base = OTHER; note = 2'-deoxy-2'-fluoroadenosine-3'-phosphate
  modified_base 9: mod_base = OTHER; note = 2'-deoxy-2'-fluoroadenosine-3'-phosphate
  modified_base 10: mod_base = OTHER; note = 2'-O-methyladenosine-3'-phosphate
  modified_base 11: mod_base = OTHER; note = 2'-O-methylguanosine-3'-phosphate
  modified_base 12: mod_base = OTHER; note = 2'-O-methyluridine-3'-phosphate
  modified_base 13: mod_base = OTHER; note = 2'-O-methyluridine-3'-phosphate
  modified_base 14: mod_base = OTHER; note = 2'-deoxy-2'-fluorocytidine-3'-phosphate
  modified_base 15: mod_base = OTHER; note = 2'-O-methyluridine-3'-phosphate
  modified_base 16: mod_base = OTHER; note = 2'-deoxy-2'-fluorouridine-3'-phosphate
  modified_base 17: mod_base = OTHER; note = 2'-O-methylcytidine-3'-phosphate
  modified_base 18: mod_base = OTHER; note = 2'-O-methylguanosine-3'-phosphate
  modified_base 19: mod_base = OTHER; note = 2'-O-methyluridine-3'-phosphate
  modified_base 20: mod_base = OTHER; note = 2'-O-methylguanosine-3'-phosphate
  modified_base 21: mod_base = OTHER; note = 2'-O-methylguanosine-3'-phosphorothioate
  modified_base 22: mod_base = OTHER; note = 2'-O-methylguanosine-3'-phosphorothioate
  modified_base 23: mod_base = OTHER; note = 2'-O-methylcytidine
tgttgagaaagttcttcgtgggc

SEQ ID NO: 492 - RNA, 23 nt, synthetic construct
  source 1..23: mol_type = other RNA
  modified_base 1: mod_base = OTHER; note = 2'-O-methyluridine-3'-phosphorothioate 5'-(E)-Vinylphosphonate
  modified_base 2: mod_base = OTHER; note = 2'-deoxy-2'-fluorocytidine-3'-phosphorothioate
  modified_base 3: mod_base = OTHER; note = 2'-O-methyladenosine-3'-phosphate
  modified_base 4: mod_base = OTHER; note = 2'-O-methylcytidine-3'-phosphate
  modified_base 5: mod_base = OTHER; note = 2'-O-methylcytidine-3'-phosphate
  modified_base 6: mod_base = OTHER; note = 2'-deoxy-2'-fluorocytidine-3'-phosphate
  modified_base 7: mod_base = OTHER; note = 2'-O-methyluridine-3'-phosphate
  modified_base 8: mod_base = OTHER; note = 2'-deoxy-2'-fluorouridine-3'-phosphate
  modified_base 9: mod_base = OTHER; note = 2'-deoxy-2'-fluorouridine-3'-phosphate
  modified_base 10: mod_base = OTHER; note = 2'-O-methyluridine-3'-phosphate
  modified_base 11: mod_base = OTHER; note = 2'-O-methyladenosine-3'-phosphate
  modified_base 12: mod_base = OTHER; note = 2'-O-methyladenosine-3'-phosphate
  modified_base 13: mod_base = OTHER; note = 2'-O-methylcytidine-3'-phosphate
  modified_base 14: mod_base = OTHER; note = 2'-deoxy-2'-fluorouridine-3'-phosphate
  modified_base 15: mod_base = OTHER; note = 2'-O-methylguanosine-3'-phosphate
  modified_base 16: mod_base = OTHER; note = 2'-deoxy-2'-fluorocytidine-3'-phosphate
  modified_base 17: mod_base = OTHER; note = 2'-O-methyladenosine-3'-phosphate
  modified_base 18: mod_base = OTHER; note = 2'-O-methyluridine-3'-phosphate
  modified_base 19: mod_base = OTHER; note = 2'-O-methyluridine-3'-phosphate
  modified_base 20: mod_base = OTHER; note = 2'-O-methylguanosine-3'-phosphate
  modified_base 21: mod_base = OTHER; note = 2'-O-methylcytidine-3'-phosphorothioate
  modified_base 22: mod_base = OTHER; note = 2'-O-methylcytidine-3'-phosphorothioate
  modified_base 23: mod_base = OTHER; note = 2'-O-methylcytidine
tcacccttttaactgcattgccc

SEQ ID NO: 493 - RNA, 23 nt, synthetic construct
  source 1..23: mol_type = other RNA
  modified_base 1: mod_base = OTHER; note = 2'-O-methyluridine-3'-phosphorothioate 5'-(E)-Vinylphosphonate
  modified_base 2: mod_base = OTHER; note = 2'-deoxy-2'-fluoroguanosine-3'-phosphorothioate
  modified_base 3: mod_base = OTHER; note = 2'-O-methyluridine-3'-phosphate
  modified_base 4: mod_base = OTHER; note = 2'-O-methyladenosine-3'-phosphate
  modified_base 5: mod_base = OTHER; note = 2'-O-methyladenosine-3'-phosphate
  modified_base 6: mod_base = OTHER; note = 2'-deoxy-2'-fluorouridine-3'-phosphate
  modified_base 7: mod_base = OTHER; note = 2'-O-methylguanosine-3'-phosphate
  modified_base 8: mod_base = OTHER; note = 2'-deoxy-2'-fluoroadenosine-3'-phosphate
  modified_base 9: mod_base = OTHER; note = 2'-deoxy-2'-fluorocytidine-3'-phosphate
  modified_base 10: mod_base = OTHER; note = 2'-O-methyluridine-3'-phosphate
  modified_base 11: mod_base = OTHER; note = 2'-O-methyladenosine-3'-phosphate
  modified_base 12: mod_base = OTHER; note = 2'-O-methylguanosine-3'-phosphate
  modified_base 13: mod_base = OTHER; note = 2'-O-methyladenosine-3'-phosphate
  modified_base 14: mod_base = OTHER; note = 2'-deoxy-2'-fluorouridine-3'-phosphate
  modified_base 15: mod_base = OTHER; note = 2'-O-methyluridine-3'-phosphate
  modified_base 16: mod_base = OTHER; note = 2'-deoxy-2'-fluorouridine-3'-phosphate
  modified_base 17: mod_base = OTHER; note = 2'-O-methylguanosine-3'-phosphate
  modified_base 18: mod_base = OTHER; note = 2'-O-methyladenosine-3'-phosphate
  modified_base 19: mod_base = OTHER; note = 2'-O-methylguanosine-3'-phosphate
  modified_base 20: mod_base = OTHER; note = 2'-O-methylguanosine-3'-phosphate
  modified_base 21: mod_base = OTHER; note = 2'-O-methylcytidine-3'-phosphorothioate
  modified_base 22: mod_base = OTHER; note = 2'-O-methyluridine-3'-phosphorothioate
  modified_base 23: mod_base = OTHER; note = 2'-O-methylcytidine
tgtaatgactagatttgaggctc

SEQ ID NO: 494 - RNA, 23 nt, synthetic construct
  source 1..23: mol_type = other RNA
  modified_base 1: mod_base = OTHER; note = 2'-O-methyluridine-3'-phosphorothioate 5'-(E)-Vinylphosphonate
  modified_base 2: mod_base = OTHER; note = 2'-deoxy-2'-fluoroadenosine-3'-phosphorothioate
  modified_base 3: mod_base = OTHER; note = 2'-O-methylcytidine-3'-phosphate
  modified_base 4: mod_base = OTHER; note = 2'-O-methyluridine-3'-phosphate
  modified_base 5: mod_base = OTHER; note = 2'-O-methyluridine-3'-phosphate
  modified_base 6: mod_base = OTHER; note = 2'-deoxy-2'-fluorocytidine-3'-phosphate
  modified_base 7: mod_base = OTHER; note = 2'-O-methyluridine-3'-phosphate
  modified_base 8: mod_base = OTHER; note = 2'-deoxy-2'-fluoroguanosine-3'-phosphate
  modified_base 9: mod_base = OTHER; note = 2'-deoxy-2'-fluorouridine-3'-phosphate
  modified_base 10: mod_base = OTHER; note = 2'-O-methyluridine-3'-phosphate
  modified_base 11: mod_base = OTHER; note = 2'-O-methylguanosine-3'-phosphate
  modified_base 12: mod_base = OTHER; note = 2'-O-methyladenosine-3'-phosphate
  modified_base 13: mod_base = OTHER; note = 2'-O-methylcytidine-3'-phosphate
  modified_base 14: mod_base = OTHER; note = 2'-deoxy-2'-fluorouridine-3'-phosphate
  modified_base 15: mod_base = OTHER; note = 2'-O-methylguanosine-3'-phosphate
  modified_base 16: mod_base = OTHER; note = 2'-deoxy-2'-fluoroguanosine-3'-phosphate
  modified_base 17: mod_base = OTHER; note = 2'-O-methyluridine-3'-phosphate
  modified_base 18: mod_base = OTHER; note = 2'-O-methylguanosine-3'-phosphate
  modified_base 19: mod_base = OTHER; note = 2'-O-methyluridine-3'-phosphate
  modified_base 20: mod_base = OTHER; note = 2'-O-methyladenosine-3'-phosphate
  modified_base 21: mod_base = OTHER; note = 2'-O-methyladenosine-3'-phosphorothioate
  modified_base 22: mod_base = OTHER; note = 2'-O-methyluridine-3'-phosphorothioate
  modified_base 23: mod_base = OTHER; note = 2'-O-methylguanosine
tacttctgttgactggtgtaatg

SEQ ID NO: 495 - RNA, 23 nt, synthetic construct
  source 1..23: mol_type = other RNA
  modified_base 1: mod_base = OTHER; note = 2'-O-methyluridine-3'-phosphorothioate 5'-(E)-Vinylphosphonate
  modified_base 2: mod_base = OTHER; note = 2'-deoxy-2'-fluoroadenosine-3'-phosphorothioate
  modified_base 3: mod_base = OTHER; note = 2'-O-methylguanosine-3'-phosphate
  modified_base 4: mod_base = OTHER; note = 2'-O-methylguanosine-3'-phosphate
  modified_base 5: mod_base = OTHER; note = 2'-O-methylguanosine-3'-phosphate
  modified_base 6: mod_base = OTHER; note = 2'-deoxy-2'-fluorouridine-3'-phosphate
  modified_base 7: mod_base = OTHER; note = 2'-O-methyluridine-3'-phosphate
  modified_base 8: mod_base = OTHER; note = 2'-deoxy-2'-fluoroadenosine-3'-phosphate
  modified_base 9: mod_base = OTHER; note = 2'-deoxy-2'-fluoroadenosine-3'-phosphate
  modified_base 10: mod_base = OTHER; note = 2'-O-methylguanosine-3'-phosphate
  modified_base 11: mod_base = OTHER; note = 2'-O-methylguanosine-3'-phosphate
  modified_base 12: mod_base = OTHER; note = 2'-O-methyladenosine-3'-phosphate
  modified_base 13: mod_base = OTHER; note = 2'-O-methylguanosine-3'-phosphate
  modified_base 14: mod_base = OTHER; note = 2'-deoxy-2'-fluorocytidine-3'-phosphate
  modified_base 15: mod_base = OTHER; note = 2'-O-methyluridine-3'-phosphate
  modified_base 16: mod_base = OTHER; note = 2'-deoxy-2'-fluoroguanosine-3'-phosphate
  modified_base 17: mod_base = OTHER; note = 2'-O-methyladenosine-3'-phosphate
  modified_base 18: mod_base = OTHER; note = 2'-O-methylguanosine-3'-phosphate
  modified_base 19: mod_base = OTHER; note = 2'-O-methylguanosine-3'-phosphate
  modified_base 20: mod_base = OTHER; note = 2'-O-methyladenosine-3'-phosphate
  modified_base 21: mod_base = OTHER; note = 2'-O-methylguanosine-3'-phosphorothioate
  modified_base 22: mod_base = OTHER; note = 2'-O-methyladenosine-3'-phosphorothioate
  modified_base 23: mod_base = OTHER; note = 2'-O-methylguanosine
tagggttaaggagctgaggagag

SEQ ID NO: 496 - RNA, 23 nt, synthetic construct
  source 1..23: mol_type = other RNA
  modified_base 1: mod_base = OTHER; note = 2'-O-methyluridine-3'-phosphorothioate 5'-(E)-Vinylphosphonate
  modified_base 2: mod_base = OTHER; note = 2'-deoxy-2'-fluoroadenosine-3'-phosphorothioate
  modified_base 3: mod_base = OTHER; note = 2'-O-methyladenosine-3'-phosphate
  modified_base 4: mod_base = OTHER; note = 2'-O-methylguanosine-3'-phosphate
  modified_base 5: mod_base = OTHER; note = 2'-O-methylguanosine-3'-phosphate
  modified_base 6: mod_base = OTHER; note = 2'-deoxy-2'-fluoroguanosine-3'-phosphate
  modified_base 7: mod_base = OTHER; note = 2'-O-methyladenosine-3'-phosphate
  modified_base 8: mod_base = OTHER; note = 2'-deoxy-2'-fluoroguanosine-3'-phosphate
  modified_base 9: mod_base = OTHER; note = 2'-deoxy-2'-fluoroadenosine-3'-phosphate
  modified_base 10: mod_base = OTHER; note = 2'-O-methylguanosine-3'-phosphate
  modified_base 11: mod_base = OTHER; note = 2'-O-methylguanosine-3'-phosphate
  modified_base 12: mod_base = OTHER; note = 2'-O-methyluridine-3'-phosphate
  modified_base 13: mod_base = OTHER; note = 2'-O-methyluridine-3'-phosphate
  modified_base 14: mod_base = OTHER; note = 2'-deoxy-2'-fluoroadenosine-3'-phosphate
  modified_base 15: mod_base = OTHER; note = 2'-O-methylcytidine-3'-phosphate
  modified_base 16: mod_base = OTHER; note = 2'-deoxy-2'-fluoroadenosine-3'-phosphate
  modified_base 17: mod_base = OTHER; note = 2'-O-methyladenosine-3'-phosphate
  modified_base 18: mod_base = OTHER; note = 2'-O-methyluridine-3'-phosphate
  modified_base 19: mod_base = OTHER; note = 2'-O-methylcytidine-3'-phosphate
  modified_base 20: mod_base = OTHER; note = 2'-O-methylcytidine-3'-phosphate
  modified_base 21: mod_base = OTHER; note = 2'-O-methyladenosine-3'-phosphorothioate
  modified_base 22: mod_base = OTHER; note = 2'-O-methylguanosine-3'-phosphorothioate
  modified_base 23: mod_base = OTHER; note = 2'-O-methylguanosine
taagggagaggttacaatccagg

SEQ ID NO: 497 - RNA, 23 nt, synthetic construct
  source 1..23: mol_type = other RNA
  modified_base 1: mod_base = OTHER; note = 2'-O-methyluridine-3'-phosphorothioate 5'-(E)-Vinylphosphonate
  modified_base 2: mod_base = OTHER; note = 2'-deoxy-2'-fluoroguanosine-3'-phosphorothioate
  modified_base 3: mod_base = OTHER; note = 2'-O-methyladenosine-3'-phosphate
  modified_base 4: mod_base = OTHER; note = 2'-O-methyladenosine-3'-phosphate
  modified_base 5: mod_base = OTHER; note = 2'-O-methyluridine-3'-phosphate
  modified_base 6: mod_base = OTHER; note = 2'-deoxy-2'-fluorocytidine-3'-phosphate
  modified_base 7: mod_base = OTHER; note = 2'-O-methylcytidine-3'-phosphate
  modified_base 8: mod_base = OTHER; note = 2'-deoxy-2'-fluorouridine-3'-phosphate
  modified_base 9: mod_base = OTHER; note = 2'-deoxy-2'-fluoroadenosine-3'-phosphate
  modified_base 10: mod_base = OTHER; note = 2'-O-methylguanosine-3'-phosphate
  modified_base 11: mod_base = OTHER; note = 2'-O-methyladenosine-3'-phosphate
  modified_base 12: mod_base = OTHER; note = 2'-O-methyluridine-3'-phosphate
  modified_base 13: mod_base = OTHER; note = 2'-O-methyluridine-3'-phosphate
  modified_base 14: mod_base = OTHER; note = 2'-deoxy-2'-fluorouridine-3'-phosphate
  modified_base 15: mod_base = OTHER; note = 2'-O-methylguanosine-3'-phosphate
  modified_base 16: mod_base = OTHER; note = 2'-deoxy-2'-fluoroguanosine-3'-phosphate
  modified_base 17: mod_base = OTHER; note = 2'-O-methyladenosine-3'-phosphate
  modified_base 18: mod_base = OTHER; note = 2'-O-methylcytidine-3'-phosphate
  modified_base 19: mod_base = OTHER; note = 2'-O-methyladenosine-3'-phosphate
  modified_base 20: mod_base = OTHER; note = 2'-O-methyladenosine-3'-phosphate
  modified_base 21: mod_base = OTHER; note = 2'-O-methylguanosine-3'-phosphorothioate
  modified_base 22: mod_base = OTHER; note = 2'-O-methylguanosine-3'-phosphorothioate
  modified_base 23: mod_base = OTHER; note = 2'-O-methylguanosine
tgaatcctagatttggacaaggg

SEQ ID NO: 498 - RNA, 23 nt, synthetic construct
  source 1..23: mol_type = other RNA
  modified_base 1: mod_base = OTHER; note = 2'-O-methyluridine-3'-phosphorothioate 5'-(E)-Vinylphosphonate
  modified_base 2: mod_base = OTHER; note = 2'-deoxy-2'-fluorouridine-3'-phosphorothioate
  modified_base 3: mod_base = OTHER; note = 2'-O-methyluridine-3'-phosphate
  modified_base 4: mod_base = OTHER; note = 2'-O-methyluridine-3'-phosphate
  modified_base 5: mod_base = OTHER; note = 2'-O-methyluridine-3'-phosphate
  modified_base 6: mod_base = OTHER; note = 2'-deoxy-2'-fluorocytidine-3'-phosphate
  modified_base 7: mod_base = OTHER; note = 2'-O-methylcytidine-3'-phosphate
  modified_base 8: mod_base = OTHER; note = 2'-deoxy-2'-fluorouridine-3'-phosphate
  modified_base 9: mod_base = OTHER; note = 2'-deoxy-2'-fluorouridine-3'-phosphate
  modified_base 10: mod_base = OTHER; note = 2'-O-methyluridine-3'-phosphate
  modified_base 11: mod_base = OTHER; note = 2'-O-methyluridine-3'-phosphate
  modified_base 12: mod_base = OTHER; note = 2'-O-methylcytidine-3'-phosphate
  modified_base 13: mod_base = OTHER; note = 2'-O-methylcytidine-3'-phosphate
  modified_base 14: mod_base = OTHER; note = 2'-deoxy-2'-fluorouridine-3'-phosphate
  modified_base 15: mod_base = OTHER; note = 2'-O-methyladenosine-3'-phosphate
  modified_base 16: mod_base = OTHER; note = 2'-deoxy-2'-fluorocytidine-3'-phosphate
  modified_base 17: mod_base = OTHER; note = 2'-O-methylcytidine-3'-phosphate
  modified_base 18: mod_base = OTHER; note = 2'-O-methyladenosine-3'-phosphate
  modified_base 19: mod_base = OTHER; note = 2'-O-methylguanosine-3'-phosphate
  modified_base 20: mod_base = OTHER; note = 2'-O-methylguanosine-3'-phosphate
  modified_base 21: mod_base = OTHER; note = 2'-O-methyladenosine-3'-phosphorothioate
  modified_base 22: mod_base = OTHER; note = 2'-O-methyladenosine-3'-phosphorothioate
  modified_base 23: mod_base = OTHER; note = 2'-O-methyluridine
tttttccttttcctaccaggaat

SEQ ID NO: 499 - RNA, 23 nt, synthetic construct
  source 1..23: mol_type = other RNA
  modified_base 1: mod_base = OTHER; note = 2'-O-methyluridine-3'-phosphorothioate 5'-(E)-Vinylphosphonate
  modified_base 2: mod_base = OTHER; note = 2'-deoxy-2'-fluoroadenosine-3'-phosphorothioate
  modified_base 3: mod_base = OTHER; note = 2'-O-methylguanosine-3'-phosphate
  modified_base 4: mod_base = OTHER; note = 2'-O-methyluridine-3'-phosphate
  modified_base 5: mod_base = OTHER; note = 2'-O-methyluridine-3'-phosphate
  modified_base 6: mod_base = OTHER; note = 2'-deoxy-2'-fluoroguanosine-3'-phosphate
  modified_base 7: mod_base = OTHER; note = 2'-O-methylguanosine-3'-phosphate
  modified_base 8: mod_base = OTHER; note = 2'-deoxy-2'-fluoroadenosine-3'-phosphate
  modified_base 9: mod_base = OTHER; note = 2'-deoxy-2'-fluoroadenosine-3'-phosphate
  modified_base 10: mod_base = OTHER; note = 2'-O-methylguanosine-3'-phosphate
  modified_base 11: mod_base = OTHER; note = 2'-O-methyluridine-3'-phosphate
  modified_base 12: mod_base = OTHER; note = 2'-O-methylguanosine-3'-phosphate
  modified_base 13: mod_base = OTHER; note = 2'-O-methylguanosine-3'-phosphate
  modified_base 14: mod_base = OTHER; note = 2'-deoxy-2'-fluorouridine-3'-phosphate
  modified_base 15: mod_base = OTHER; note = 2'-O-methylguanosine-3'-phosphate
  modified_base 16: mod_base = OTHER; note = 2'-deoxy-2'-fluoroguanosine-3'-phosphate
  modified_base 17: mod_base = OTHER; note = 2'-O-methyladenosine-3'-phosphate
  modified_base 18: mod_base = OTHER; note = 2'-O-methylguanosine-3'-phosphate
  modified_base 19: mod_base = OTHER; note = 2'-O-methylguanosine-3'-phosphate
  modified_base 20: mod_base = OTHER; note = 2'-O-methylguanosine-3'-phosphate
  modified_base 21: mod_base = OTHER; note = 2'-O-methyladenosine-3'-phosphorothioate
  modified_base 22: mod_base = OTHER; note = 2'-O-methyladenosine-3'-phosphorothioate
  modified_base 23: mod_base = OTHER; note = 2'-O-methylguanosine
tagttggaagtggtggagggaag

SEQ ID NO: 500 - RNA, 23 nt, synthetic construct
  source 1..23: mol_type = other RNA
  modified_base 1: mod_base = OTHER; note = 2'-O-methyluridine-3'-phosphorothioate 5'-(E)-Vinylphosphonate
  modified_base 2: mod_base = OTHER; note = 2'-deoxy-2'-fluorocytidine-3'-phosphorothioate
  modified_base 3: mod_base = OTHER; note = 2'-O-methyluridine-3'-phosphate
  modified_base 4: mod_base = OTHER; note = 2'-O-methylcytidine-3'-phosphate
  modified_base 5: mod_base = OTHER; note = 2'-O-methyluridine-3'-phosphate
  modified_base 6: mod_base = OTHER; note = 2'-deoxy-2'-fluoroguanosine-3'-phosphate
  modified_base 7: mod_base = OTHER; note = 2'-O-methylguanosine-3'-phosphate
  modified_base 8: mod_base = OTHER; note = 2'-deoxy-2'-fluorouridine-3'-phosphate
  modified_base 9: mod_base = OTHER; note = 2'-deoxy-2'-fluorouridine-3'-phosphate
  modified_base 10: mod_base = OTHER; note = 2'-O-methylcytidine-3'-phosphate
  modified_base 11: mod_base = OTHER; note = 2'-O-methyluridine-3'-phosphate
  modified_base 12: mod_base = OTHER; note = 2'-O-methylcytidine-3'-phosphate
  modified_base 13: mod_base = OTHER; note = 2'-O-methylcytidine-3'-phosphate
  modified_base 14: mod_base = OTHER; note = 2'-deoxy-2'-fluoroadenosine-3'-phosphate
  modified_base 15: mod_base = OTHER; note = 2'-O-methyladenosine-3'-phosphate
  modified_base 16: mod_base = OTHER; note = 2'-deoxy-2'-fluoroguanosine-3'-phosphate
  modified_base 17: mod_base = OTHER; note = 2'-O-methyluridine-3'-phosphate
  modified_base 18: mod_base = OTHER; note = 2'-O-methylcytidine-3'-phosphate
  modified_base 19: mod_base = OTHER; note = 2'-O-methylcytidine-3'-phosphate
  modified_base 20: mod_base = OTHER; note = 2'-O-methyladenosine-3'-phosphate
  modified_base 21: mod_base = OTHER; note = 2'-O-methylguanosine-3'-phosphorothioate
  modified_base 22: mod_base = OTHER; note = 2'-O-methylguanosine-3'-phosphorothioate
  modified_base 23: mod_base = OTHER; note = 2'-O-methyluridine
tctctggttctccaagtccaggt

SEQ ID NO: 501 - RNA, 23 nt, synthetic construct
  source 1..23: mol_type = other RNA
  modified_base 1: mod_base = OTHER; note = 2'-O-methyluridine-3'-phosphorothioate 5'-(E)-Vinylphosphonate
  modified_base 2: mod_base = OTHER; note = 2'-deoxy-2'-fluoroadenosine-3'-phosphorothioate
  modified_base 3: mod_base = OTHER; note = 2'-O-methylguanosine-3'-phosphate
  modified_base 4: mod_base = OTHER; note = 2'-O-methylcytidine-3'-phosphate
  modified_base 5: mod_base = OTHER; note = 2'-O-methyluridine-3'-phosphate
  modified_base 6: mod_base = OTHER; note = 2'-deoxy-2'-fluorocytidine-3'-phosphate
  modified_base 7: mod_base = OTHER; note = 2'-O-methyluridine-3'-phosphate
  modified_base 8: mod_base = OTHER; note = 2'-deoxy-2'-fluoroguanosine-3'-phosphate
  modified_base 9: mod_base = OTHER; note = 2'-deoxy-2'-fluoroadenosine-3'-phosphate
  modified_base 10: mod_base = OTHER; note = 2'-O-methyluridine-3'-phosphate
  modified_base 11: mod_base = OTHER; note = 2'-O-methyluridine-3'-phosphate
  modified_base 12: mod_base = OTHER; note = 2'-O-methylcytidine-3'-phosphate
  modified_base 13: mod_base = OTHER; note = 2'-O-methyluridine-3'-phosphate
  modified_base 14: mod_base = OTHER; note = 2'-deoxy-2'-fluoroadenosine-3'-phosphate
  modified_base 15: mod_base = OTHER; note = 2'-O-methyladenosine-3'-phosphate
  modified_base 16: mod_base = OTHER; note = 2'-deoxy-2'-fluorocytidine-3'-phosphate
  modified_base 17: mod_base = OTHER; note = 2'-O-methyladenosine-3'-phosphate
  modified_base 18: mod_base = OTHER; note = 2'-O-methylguanosine-3'-phosphate
  modified_base 19: mod_base = OTHER; note = 2'-O-methylguanosine-3'-phosphate
  modified_base 20: mod_base = OTHER; note = 2'-O-methyluridine-3'-phosphate
  modified_base 21: mod_base = OTHER; note = 2'-O-methylguanosine-3'-phosphorothioate
  modified_base 22: mod_base = OTHER; note = 2'-O-methylcytidine-3'-phosphorothioate
  modified_base 23: mod_base = OTHER; note = 2'-O-methylcytidine
tagctctgattctaacaggtgcc

SEQ ID NO: 502 - RNA, 23 nt, synthetic construct
  source 1..23: mol_type = other RNA
  modified_base 1: mod_base = OTHER; note = 2'-O-methyluridine-3'-phosphorothioate 5'-(E)-Vinylphosphonate
  modified_base 2: mod_base = OTHER; note = 2'-deoxy-2'-fluoroguanosine-3'-phosphorothioate
  modified_base 3: mod_base = OTHER; note = 2'-O-methyluridine-3'-phosphate
  modified_base 4: mod_base = OTHER; note = 2'-O-methylcytidine-3'-phosphate
  modified_base 5: mod_base = OTHER; note = 2'-O-methylcytidine-3'-phosphate
  modified_base 6: mod_base = OTHER; note = 2'-deoxy-2'-fluorocytidine-3'-phosphate
  modified_base 7: mod_base = OTHER; note = 2'-O-methyladenosine-3'-phosphate
  modified_base 8: mod_base = OTHER; note = 2'-deoxy-2'-fluoroadenosine-3'-phosphate
  modified_base 9: mod_base = OTHER; note = 2'-deoxy-2'-fluoroguanosine-3'-phosphate
  modified_base 10: mod_base = OTHER; note = 2'-O-methyladenosine-3'-phosphate
  modified_base 11: mod_base = OTHER; note = 2'-O-methyladenosine-3'-phosphate
  modified_base 12: mod_base = OTHER; note = 2'-O-methyladenosine-3'-phosphate
  modified_base 13: mod_base = OTHER; note = 2'-O-methyluridine-3'-phosphate
  modified_base 14: mod_base = OTHER; note = 2'-deoxy-2'-fluorocytidine-3'-phosphate
  modified_base 15: mod_base = OTHER; note = 2'-O-methylcytidine-3'-phosphate
  modified_base 16: mod_base = OTHER; note = 2'-deoxy-2'-fluorouridine-3'-phosphate
  modified_base 17: mod_base = OTHER; note = 2'-O-methylguanosine-3'-phosphate
  modified_base 18: mod_base = OTHER; note = 2'-O-methylcytidine-3'-phosphate
  modified_base 19: mod_base = OTHER; note = 2'-O-methyladenosine-3'-phosphate
  modified_base 20: mod_base = OTHER; note = 2'-O-methylguanosine-3'-phosphate
  modified_base 21: mod_base = OTHER; note = 2'-O-methylcytidine-3'-phosphorothioate
  modified_base 22: mod_base = OTHER; note = 2'-O-methyluridine-3'-phosphorothioate
  modified_base 23: mod_base = OTHER; note = 2'-O-methylcytidine
tgtcccaagaaatcctgcagctc

SEQ ID NO: 503 - RNA, 23 nt, synthetic construct
  source 1..23: mol_type = other RNA
  modified_base 1: mod_base = OTHER; note = 2'-O-methyluridine-3'-phosphorothioate 5'-(E)-Vinylphosphonate
  modified_base 2: mod_base = OTHER; note = 2'-deoxy-2'-fluorocytidine-3'-phosphorothioate
  modified_base 3: mod_base = OTHER; note = 2'-O-methyluridine-3'-phosphate
  modified_base 4: mod_base = OTHER; note = 2'-O-methyluridine-3'-phosphate
  modified_base 5: mod_base = OTHER; note = 2'-O-methylcytidine-3'-phosphate
  modified_base 6: mod_base = OTHER; note = 2'-deoxy-2'-fluorouridine-3'-phosphate
  modified_base 7: mod_base = OTHER; note = 2'-O-methylcytidine-3'-phosphate
  modified_base 8: mod_base = OTHER; note = 2'-deoxy-2'-fluorocytidine-3'-phosphate
  modified_base 9: mod_base = OTHER; note = 2'-deoxy-2'-fluorouridine-3'-phosphate
  modified_base 10: mod_base = OTHER; note = 2'-O-methyluridine-3'-phosphate
  modified_base 11: mod_base = OTHER; note = 2'-O-methylguanosine-3'-phosphate
  modified_base 12: mod_base = OTHER; note = 2'-O-methyladenosine-3'-phosphate
  modified_base 13: mod_base = OTHER; note = 2'-O-methyladenosine-3'-phosphate
  modified_base 14: mod_base = OTHER; note = 2'-deoxy-2'-fluoroadenosine-3'-phosphate
  modified_base 15: mod_base = OTHER; note = 2'-O-methylguanosine-3'-phosphate
  modified_base 16: mod_base = OTHER; note = 2'-deoxy-2'-fluoroadenosine-3'-phosphate
  modified_base 17: mod_base = OTHER; note = 2'-O-methylguanosine-3'-phosphate
  modified_base 18: mod_base = OTHER; note = 2'-O-methylguanosine-3'-phosphate
  modified_base 19: mod_base = OTHER; note = 2'-O-methylguanosine-3'-phosphate
  modified_base 20: mod_base = OTHER; note = 2'-O-methyladenosine-3'-phosphate
  modified_base 21: mod_base = OTHER; note = 2'-O-methyladenosine-3'-phosphorothioate
  modified_base 22: mod_base = OTHER; note = 2'-O-methylguanosine-3'-phosphorothioate
  modified_base 23: mod_base = OTHER; note = 2'-O-methylguanosine
tcttctccttgaaagagggaagg

SEQ ID NO: 504 - RNA, 23 nt, synthetic construct
  source 1..23: mol_type = other RNA
  modified_base 1: mod_base = OTHER; note = 2'-O-methyluridine-3'-phosphorothioate 5'-(E)-Vinylphosphonate
  modified_base 2: mod_base = OTHER; note = 2'-deoxy-2'-fluoroadenosine-3'-phosphorothioate
  modified_base 3: mod_base = OTHER; note = 2'-O-methyladenosine-3'-phosphate
  modified_base 4: mod_base = OTHER; note = 2'-O-methylguanosine-3'-phosphate
  modified_base 5: mod_base = OTHER; note = 2'-O-methyladenosine-3'-phosphate
  modified_base 6: mod_base = OTHER; note = 2'-deoxy-2'-fluoroadenosine-3'-phosphate
  modified_base 7: mod_base = OTHER; note = 2'-O-methyluridine-3'-phosphate
  modified_base 8: mod_base = OTHER; note = 2'-deoxy-2'-fluoroadenosine-3'-phosphate
  modified_base 9: mod_base = OTHER; note = 2'-deoxy-2'-fluorocytidine-3'-phosphate
  modified_base 10: mod_base = OTHER; note = 2'-O-methyladenosine-3'-phosphate
  modified_base 11: mod_base = OTHER; note = 2'-O-methyladenosine-3'-phosphate
  modified_base 12: mod_base = OTHER; note = 2'-O-methylguanosine-3'-phosphate
  modified_base 13: mod_base = OTHER; note = 2'-O-methylcytidine-3'-phosphate
  modified_base 14: mod_base = OTHER; note = 2'-deoxy-2'-fluorouridine-3'-phosphate
  modified_base 15: mod_base = OTHER; note = 2'-O-methylguanosine-3'-phosphate
  modified_base 16: mod_base = OTHER; note = 2'-deoxy-2'-fluorocytidine-3'-phosphate
  modified_base 17: mod_base = OTHER; note = 2'-O-methyladenosine-3'-phosphate
  modified_base 18: mod_base = OTHER; note = 2'-O-methyladenosine-3'-phosphate
  modified_base 19: mod_base = OTHER; note = 2'-O-methyluridine-3'-phosphate
  modified_base 20: mod_base = OTHER; note = 2'-O-methylcytidine-3'-phosphate
  modified_base 21: mod_base = OTHER; note = 2'-O-methyladenosine-3'-phosphorothioate
  modified_base 22: mod_base = OTHER; note = 2'-O-methyluridine-3'-phosphorothioate
  modified_base 23: mod_base = OTHER; note = 2'-O-methylguanosine
taagaatacaagctgcaatcatg

SEQ ID NO: 505 - RNA, 23 nt, synthetic construct
  source 1..23: mol_type = other RNA
  modified_base 1: mod_base = OTHER; note = 2'-O-methyluridine-3'-phosphorothioate 5'-(E)-Vinylphosphonate
  modified_base 2: mod_base = OTHER; note = 2'-deoxy-2'-fluorouridine-3'-phosphorothioate
  modified_base 3: mod_base = OTHER; note = 2'-O-methyladenosine-3'-phosphate
  modified_base 4: mod_base = OTHER; note = 2'-O-methylguanosine-3'-phosphate
  modified_base 5: mod_base = OTHER; note = 2'-O-methyladenosine-3'-phosphate
  modified_base 6: mod_base = OTHER; note = 2'-deoxy-2'-fluorouridine-3'-phosphate
  modified_base 7: mod_base = OTHER; note = 2'-O-methyluridine-3'-phosphate
  modified_base 8: mod_base = OTHER; note = 2'-deoxy-2'-fluoroguanosine-3'-phosphate
  modified_base 9: mod_base = OTHER; note = 2'-deoxy-2'-fluorouridine-3'-phosphate
  modified_base 10: mod_base = OTHER; note = 2'-O-methyladenosine-3'-phosphate
  modified_base 11: mod_base = OTHER; note = 2'-O-methyladenosine-3'-phosphate
  modified_base 12: mod_base = OTHER; note = 2'-O-methyluridine-3'-phosphate
  modified_base 13: mod_base = OTHER; note = 2'-O-methyladenosine-3'-phosphate
  modified_base 14: mod_base = OTHER; note = 2'-deoxy-2'-fluoroadenosine-3'-phosphate
  modified_base 15: mod_base = OTHER; note = 2'-O-methylguanosine-3'-phosphate
  modified_base 16: mod_base = OTHER; note = 2'-deoxy-2'-fluoroguanosine-3'-phosphate
  modified_base 17: mod_base = OTHER; note = 2'-O-methylcytidine-3'-phosphate
  modified_base 18: mod_base = OTHER; note = 2'-O-methyluridine-3'-phosphate
  modified_base 19: mod_base = OTHER; note = 2'-O-methyladenosine-3'-phosphate
  modified_base 20: mod_base = OTHER; note = 2'-O-methyladenosine-3'-phosphate
  modified_base 21: mod_base = OTHER; note = 2'-O-methyladenosine-3'-phosphorothioate
  modified_base 22: mod_base = OTHER; note = 2'-O-methylguanosine-3'-phosphorothioate
  modified_base 23: mod_base = OTHER; note = 2'-O-methyladenosine
ttagattgtaataaggctaaaga

SEQ ID NO: 506 - RNA, 23 nt, synthetic construct
  source 1..23: mol_type = other RNA
  modified_base 1: mod_base = OTHER; note = 2'-O-methyluridine-3'-phosphorothioate 5'-(E)-Vinylphosphonate
  modified_base 2: mod_base = OTHER; note = 2'-deoxy-2'-fluorouridine-3'-phosphorothioate
  modified_base 3: mod_base = OTHER; note = 2'-O-methyluridine-3'-phosphate
  modified_base 4: mod_base = OTHER; note = 2'-O-methylguanosine-3'-phosphate
  modified_base 5: mod_base = OTHER; note = 2'-O-methyladenosine-3'-phosphate
  modified_base 6: mod_base = OTHER; note = 2'-deoxy-2'-fluoroguanosine-3'-phosphate
  modified_base 7: mod_base = OTHER; note = 2'-O-methyluridine-3'-phosphate
  modified_base 8: mod_base = OTHER; note = 2'-deoxy-2'-fluorouridine-3'-phosphate
  modified_base 9: mod_base = OTHER; note = 2'-deoxy-2'-fluoroguanosine-3'-phosphate
  modified_base 10: mod_base = OTHER; note = 2'-O-methyluridine-3'-phosphate
  modified_base 11: mod_base = OTHER; note = 2'-O-methylcytidine-3'-phosphate
  modified_base 12: mod_base = OTHER; note = 2'-O-methyladenosine-3'-phosphate
  modified_base 13: mod_base = OTHER; note = 2'-O-methylguanosine-3'-phosphate
  modified_base 14: mod_base = OTHER; note = 2'-deoxy-2'-fluoroguanosine-3'-phosphate
  modified_base 15: mod_base = OTHER; note = 2'-O-methylcytidine-3'-phosphate
  modified_base 16: mod_base = OTHER; note = 2'-deoxy-2'-fluoroadenosine-3'-phosphate
  modified_base 17: mod_base = OTHER; note = 2'-O-methylcytidine-3'-phosphate
  modified_base 18: mod_base = OTHER; note = 2'-O-methyladenosine-3'-phosphate
  modified_base 19: mod_base = OTHER; note = 2'-O-methyluridine-3'-phosphate
  modified_base 20: mod_base = OTHER; note = 2'-O-methyladenosine-3'-phosphate
  modified_base 21: mod_base = OTHER; note = 2'-O-methylguanosine-3'-phosphorothioate
  modified_base 22: mod_base = OTHER; note = 2'-O-methyladenosine-3'-phosphorothioate
  modified_base 23: mod_base = OTHER; note = 2'-O-methyluridine
tttgagttgtcaggcacatagat

SEQ ID NO: 507 - RNA, 23 nt, synthetic construct
  source 1..23: mol_type = other RNA
  modified_base 1: mod_base = OTHER; note = 2'-O-methyluridine-3'-phosphorothioate 5'-(E)-Vinylphosphonate
  modified_base 2: mod_base = OTHER; note = 2'-deoxy-2'-fluoroguanosine-3'-phosphorothioate
  modified_base 3: mod_base = OTHER; note = 2'-O-methyluridine-3'-phosphate
  modified_base 4: mod_base = OTHER; note = 2'-O-methylcytidine-3'-phosphate
  modified_base 5: mod_base = OTHER; note = 2'-O-methyluridine-3'-phosphate
  modified_base 6: mod_base = OTHER; note = 2'-deoxy-2'-fluoroguanosine-3'-phosphate
  modified_base 7: mod_base = OTHER; note = 2'-O-methylguanosine-3'-phosphate
  modified_base 8: mod_base = OTHER; note = 2'-deoxy-2'-fluorouridine-3'-phosphate
  modified_base 9: mod_base = OTHER; note = 2'-deoxy-2'-fluorouridine-3'-phosphate
  modified_base 10: mod_base = OTHER; note = 2'-O-methylguanosine-3'-phosphate
  modified_base 11: mod_base = OTHER; note = 2'-O-methyluridine-3'-phosphate
  modified_base 12: mod_base = OTHER; note = 2'-O-methyluridine-3'-phosphate
  modified_base 13: mod_base = OTHER; note = 2'-O-methylcytidine-3'-phosphate
  modified_base 14: mod_base = OTHER; note = 2'-deoxy-2'-fluoroadenosine-3'-phosphate
  modified_base 15: mod_base = OTHER; note = 2'-O-methylguanosine-3'-phosphate
  modified_base 16: mod_base = OTHER; note = 2'-deoxy-2'-fluorouridine-3'-phosphate
  modified_base 17: mod_base = OTHER; note = 2'-O-methyluridine-3'-phosphate
  modified_base 18: mod_base = OTHER; note = 2'-O-methylguanosine-3'-phosphate
  modified_base 19: mod_base = OTHER; note = 2'-O-methylguanosine-3'-phosphate
  modified_base 20: mod_base = OTHER; note = 2'-O-methyladenosine-3'-phosphate
  modified_base 21: mod_base = OTHER; note = 2'-O-methylguanosine-3'-phosphorothioate
  modified_base 22: mod_base = OTHER; note = 2'-O-methylcytidine-3'-phosphorothioate
  modified_base 23: mod_base = OTHER; note = 2'-O-methyluridine
tgtctggttgttcagttggagct

SEQ ID NO: 508 - RNA, 23 nt, synthetic construct
  source 1..23: mol_type = other RNA
  modified_base 1: mod_base = OTHER; note = 2'-O-methyluridine-3'-phosphorothioate 5'-(E)-Vinylphosphonate
  modified_base 2: mod_base = OTHER; note = 2'-deoxy-2'-fluoroadenosine-3'-phosphorothioate
  modified_base 3: mod_base = OTHER; note = 2'-O-methylguanosine-3'-phosphate
  modified_base 4: mod_base = OTHER; note = 2'-O-methylguanosine-3'-phosphate
  modified_base 5: mod_base = OTHER; note = 2'-O-methyladenosine-3'-phosphate
  modified_base 6: mod_base = OTHER; note = 2'-deoxy-2'-fluorouridine-3'-phosphate
  modified_base 7: mod_base = OTHER; note = 2'-O-methylguanosine-3'-phosphate
  modified_base 8: mod_base = OTHER; note = 2'-deoxy-2'-fluoroadenosine-3'-phosphate
  modified_base 9: mod_base = OTHER; note = 2'-deoxy-2'-fluorouridine-3'-phosphate
  modified_base 10: mod_base = OTHER; note = 2'-O-methylguanosine-3'-phosphate
  modified_base 11: mod_base = OTHER; note = 2'-O-methyladenosine-3'-phosphate
  modified_base 12: mod_base = OTHER; note = 2'-O-methylguanosine-3'-phosphate
  modified_base 13: mod_base = OTHER; note = 2'-O-methyladenosine-3'-phosphate
  modified_base 14: mod_base = OTHER; note = 2'-deoxy-2'-fluoroguanosine-3'-phosphate
  modified_base 15: mod_base = OTHER; note = 2'-O-methyluridine-3'-phosphate
  modified_base 16: mod_base = OTHER; note = 2'-deoxy-2'-fluorouridine-3'-phosphate
  modified_base 17: mod_base = OTHER; note = 2'-O-methylguanosine-3'-phosphate
  modified_base 18: mod_base = OTHER; note = 2'-O-methyluridine-3'-phosphate
  modified_base 19: mod_base = OTHER; note = 2'-O-methylcytidine-3'-phosphate
  modified_base 20: mod_base = OTHER; note = 2'-O-methyluridine-3'-phosphate
  modified_base 21: mod_base = OTHER; note = 2'-O-methylguanosine-3'-phosphorothioate
  modified_base 22: mod_base = OTHER; note = 2'-O-methyluridine-3'-phosphorothioate
  modified_base 23: mod_base = OTHER; note = 2'-O-methylcytidine
taggatgatgagagttgtctgtc

SEQ ID NO: 509 - RNA, 23 nt, synthetic construct
  source 1..23: mol_type = other RNA
  modified_base 1: mod_base = OTHER; note = 2'-O-methyluridine-3'-phosphorothioate 5'-(E)-Vinylphosphonate
  modified_base 2: mod_base = OTHER; note = 2'-deoxy-2'-fluorocytidine-3'-phosphorothioate
  modified_base 3: mod_base = OTHER; note = 2'-O-methyluridine-3'-phosphate
  modified_base 4: mod_base = OTHER; note = 2'-O-methyladenosine-3'-phosphate
  modified_base 5: mod_base = OTHER; note = 2'-O-methyluridine-3'-phosphate
  modified_base 6: mod_base = OTHER; note = 2'-deoxy-2'-fluorouridine-3'-phosphate
  modified_base 7: mod_base = OTHER; note = 2'-O-methyluridine-3'-phosphate
  modified_base 8: mod_base = OTHER; note = 2'-deoxy-2'-fluorouridine-3'-phosphate
  modified_base 9: mod_base = OTHER; note = 2'-deoxy-2'-fluorocytidine-3'-phosphate
  modified_base 10: mod_base = OTHER; note = 2'-O-methyluridine-3'-phosphate
  modified_base 11: mod_base = OTHER; note = 2'-O-methylcytidine-3'-phosphate
  modified_base 12: mod_base = OTHER; note = 2'-O-methyluridine-3'-phosphate
  modified_base 13: mod_base = OTHER; note = 2'-O-methylcytidine-3'-phosphate
  modified_base 14: mod_base = OTHER; note = 2'-deoxy-2'-fluorouridine-3'-phosphate
  modified_base 15: mod_base = OTHER; note = 2'-O-methylguanosine-3'-phosphate
  modified_base 16: mod_base = OTHER; note = 2'-deoxy-2'-fluoroguanosine-3'-phosphate
  modified_base 17: mod_base = OTHER; note = 2'-O-methyladenosine-3'-phosphate
  modified_base 18: mod_base = OTHER; note = 2'-O-methylguanosine-3'-phosphate
  modified_base 19: mod_base = OTHER; note = 2'-O-methylguanosine-3'-phosphate
  modified_base 20: mod_base = OTHER; note = 2'-O-methyladenosine-3'-phosphate
  modified_base 21: mod_base = OTHER; note = 2'-O-methyluridine-3'-phosphorothioate
  modified_base 22: mod_base = OTHER; note = 2'-O-methylguanosine-3'-phosphorothioate
  modified_base 23: mod_base = OTHER; note = 2'-O-methyladenosine
tctattttctctctggaggatga

SEQ ID NO: 510 - RNA, 23 nt, synthetic construct
  source 1..23: mol_type = other RNA
  modified_base 1: mod_base = OTHER; note = 2'-O-methyluridine-3'-phosphorothioate 5'-(E)-Vinylphosphonate
  modified_base 2: mod_base = OTHER; note = 2'-deoxy-2'-fluorouridine-3'-phosphorothioate
  modified_base 3: mod_base = OTHER; note = 2'-O-methylcytidine-3'-phosphate
  modified_base 4: mod_base = OTHER; note = 2'-O-methyluridine-3'-phosphate
  modified_base 5: mod_base = OTHER; note = 2'-O-methyluridine-3'-phosphate
  modified_base 6: mod_base = OTHER; note = 2'-deoxy-2'-fluorouridine-3'-phosphate
  modified_base 7: mod_base = OTHER; note = 2'-O-methylguanosine-3'-phosphate
  modified_base 8: mod_base = OTHER; note = 2'-deoxy-2'-fluoroadenosine-3'-phosphate
  modified_base 9: mod_base = OTHER; note = 2'-deoxy-2'-fluoroguanosine-3'-phosphate
  modified_base 10: mod_base = OTHER; note = 2'-O-methyladenosine-3'-phosphate
  modified_base 11: mod_base = OTHER; note = 2'-O-methylcytidine-3'-phosphate
  modified_base 12: mod_base = OTHER; note = 2'-O-methyladenosine-3'-phosphate
  modified_base 13: mod_base = OTHER; note = 2'-O-methylcytidine-3'-phosphate
  modified_base 14: mod_base = OTHER; note = 2'-deoxy-2'-fluoroguanosine-3'-phosphate
  modified_base 15: mod_base = OTHER; note = 2'-O-methylguanosine-3'-phosphate
  modified_base 16: mod_base = OTHER; note = 2'-deoxy-2'-fluorocytidine-3'-phosphate
  modified_base 17: mod_base = OTHER; note = 2'-O-methylcytidine-3'-phosphate
  modified_base 18: mod_base = OTHER; note = 2'-O-methyluridine-3'-phosphate
  modified_base 19: mod_base = OTHER; note = 2'-O-methyladenosine-3'-phosphate
  modified_base 20: mod_base = OTHER; note = 2'-O-methyluridine-3'-phosphate
  modified_base 21: mod_base = OTHER; note = 2'-O-methyluridine-3'-phosphorothioate
  modified_base 22: mod_base = OTHER; note = 2'-O-methyluridine-3'-phosphorothioate
  modified_base 23: mod_base = OTHER; note = 2'-O-methyluridine
ttctttgagacacggcctatttt

SEQ ID NO: 511 - RNA, 23 nt, synthetic construct
  source 1..23: mol_type = other RNA
  modified_base 1: mod_base = OTHER; note = 2'-O-methyluridine-3'-phosphorothioate 5'-(E)-Vinylphosphonate
  modified_base 2: mod_base = OTHER; note = 2'-deoxy-2'-fluorouridine-3'-phosphorothioate
  modified_base 3: mod_base = OTHER; note = 2'-O-methyladenosine-3'-phosphate
  modified_base 4: mod_base = OTHER; note = 2'-O-methylguanosine-3'-phosphate
  modified_base 5: mod_base = OTHER; note = 2'-O-methyladenosine-3'-phosphate
  modified_base 6: mod_base = OTHER; note = 2'-deoxy-2'-fluorocytidine-3'-phosphate
  modified_base 7: mod_base = OTHER; note = 2'-O-methylcytidine-3'-phosphate
  modified_base 8: mod_base = OTHER; note = 2'-deoxy-2'-fluoroadenosine-3'-phosphate
  modified_base 9: mod_base = OTHER; note = 2'-deoxy-2'-fluoroadenosine-3'-phosphate
  modified_base 10: mod_base = OTHER; note = 2'-O-methylguanosine-3'-phosphate
  modified_base 11: mod_base = OTHER; note = 2'-O-methyladenosine-3'-phosphate
  modified_base 12: mod_base = OTHER; note = 2'-O-methyladenosine-3'-phosphate
  modified_base 13: mod_base = OTHER; note = 2'-O-methylcytidine-3'-phosphate
  modified_base 14: mod_base = OTHER; note = 2'-deoxy-2'-fluorocytidine-3'-phosphate
  modified_base 15: mod_base = OTHER; note = 2'-O-methyluridine-3'-phosphate
  modified_base 16: mod_base = OTHER; note = 2'-deoxy-2'-fluorouridine-3'-phosphate
  modified_base 17: mod_base = OTHER; note = 2'-O-methyluridine-3'-phosphate
  modified_base 18: mod_base = OTHER; note = 2'-O-methylcytidine-3'-phosphate
  modified_base 19: mod_base = OTHER; note = 2'-O-methyluridine-3'-phosphate
  modified_base 20: mod_base = OTHER; note = 2'-O-methyluridine-3'-phosphate
  modified_base 21: mod_base = OTHER; note = 2'-O-methyluridine-3'-phosphorothioate
  modified_base 22: mod_base = OTHER; note = 2'-O-methylguanosine-3'-phosphorothioate
  modified_base 23: mod_base = OTHER; note = 2'-O-methyladenosine
ttagaccaagaacctttctttga

SEQ ID NO: 512 - RNA, 23 nt, synthetic construct
  source 1..23: mol_type = other RNA
  modified_base 1: mod_base = OTHER; note = 2'-O-methyluridine-3'-phosphorothioate 5'-(E)-Vinylphosphonate
  modified_base 2: mod_base = OTHER; note = 2'-deoxy-2'-fluoroadenosine-3'-phosphorothioate
  modified_base 3: mod_base = OTHER; note = 2'-O-methylcytidine-3'-phosphate
  modified_base 4: mod_base = OTHER; note = 2'-O-methyladenosine-3'-phosphate
  modified_base 5: mod_base = OTHER; note = 2'-O-methyluridine-3'-phosphate
  modified_base 6: mod_base = OTHER; note = 2'-deoxy-2'-fluoroguanosine-3'-phosphate
  modified_base 7: mod_base = OTHER; note = 2'-O-methylguanosine-3'-phosphate
  modified_base 8: mod_base = OTHER; note = 2'-deoxy-2'-fluorocytidine-3'-phosphate
  modified_base 9: mod_base = OTHER; note = 2'-deoxy-2'-fluorocytidine-3'-phosphate
  modified_base 10: mod_base = OTHER; note = 2'-O-methyladenosine-3'-phosphate
  modified_base 11: mod_base = OTHER; note = 2'-O-methyladenosine-3'-phosphate
  modified_base 12: mod_base = OTHER; note = 2'-O-methylcytidine-3'-phosphate
  modified_base 13: mod_base = OTHER; note = 2'-O-methyluridine-3'-phosphate
  modified_base 14: mod_base = OTHER; note = 2'-deoxy-2'-fluorouridine-3'-phosphate
  modified_base 15: mod_base = OTHER; note = 2'-O-methyluridine-3'-phosphate
  modified_base 16: mod_base = OTHER; note = 2'-deoxy-2'-fluoroguanosine-3'-phosphate
  modified_base 17: mod_base = OTHER; note = 2'-O-methylcytidine-3'-phosphate
  modified_base 18: mod_base = OTHER; note = 2'-O-methyladenosine-3'-phosphate
  modified_base 19: mod_base = OTHER; note = 2'-O-methylguanosine-3'-phosphate
  modified_base 20: mod_base = OTHER; note = 2'-O-methylcytidine-3'-phosphate
  modified_base 21: mod_base = OTHER; note = 2'-O-methyladenosine-3'-phosphorothioate
  modified_base 22: mod_base = OTHER; note = 2'-O-methylguanosine-3'-phosphorothioate
  modified_base 23: mod_base = OTHER; note = 2'-O-methylguanosine
tacatggccaactttgcagcagg

SEQ ID NO: 513 - RNA, 23 nt, synthetic construct
  source 1..23: mol_type = other RNA
  modified_base 1: mod_base = OTHER; note = 2'-O-methyluridine-3'-phosphorothioate 5'-(E)-Vinylphosphonate
  modified_base 2: mod_base = OTHER; note = 2'-deoxy-2'-fluoroadenosine-3'-phosphorothioate
  modified_base 3: mod_base = OTHER; note = 2'-O-methyladenosine-3'-phosphate
  modified_base 4: mod_base = OTHER; note = 2'-O-methyladenosine-3'-phosphate
  modified_base 5: mod_base = OTHER; note = 2'-O-methylguanosine-3'-phosphate
  modified_base 6: mod_base = OTHER; note = 2'-deoxy-2'-fluorouridine-3'-phosphate
  modified_base 7: mod_base = OTHER; note = 2'-O-methyluridine-3'-phosphate
  modified_base 8: mod_base = OTHER; note = 2'-deoxy-2'-fluorouridine-3'-phosphate
  modified_base 9: mod_base = OTHER; note = 2'-deoxy-2'-fluorocytidine-3'-phosphate
  modified_base 10: mod_base = OTHER; note = 2'-O-methylcytidine-3'-phosphate
  modified_base 11: mod_base = OTHER; note = 2'-O-methylcytidine-3'-phosphate
  modified_base 12: mod_base = OTHER; note = 2'-O-methyluridine-3'-phosphate
  modified_base 13: mod_base = OTHER; note = 2'-O-methylguanosine-3'-phosphate
  modified_base 14: mod_base = OTHER; note = 2'-deoxy-2'-fluorouridine-3'-phosphate
  modified_base 15: mod_base = OTHER; note = 2'-O-methylguanosine-3'-phosphate
  modified_base 16: mod_base = OTHER; note = 2'-deoxy-2'-fluoroadenosine-3'-phosphate
  modified_base 17: mod_base = OTHER; note = 2'-O-methyladenosine-3'-phosphate
  modified_base 18: mod_base = OTHER; note = 2'-O-methyladenosine-3'-phosphate
  modified_base 19: mod_base = OTHER; note = 2'-O-methylcytidine-3'-phosphate
  modified_base 20: mod_base = OTHER; note = 2'-O-methyladenosine-3'-phosphate
  modified_base 21: mod_base = OTHER; note = 2'-O-methyluridine-3'-phosphorothioate
  modified_base 22: mod_base = OTHER; note = 2'-O-methylguanosine-3'-phosphorothioate
  modified_base 23: mod_base = OTHER; note = 2'-O-methylguanosine
taaagtttccctgtgaaacatgg

SEQ ID NO: 514 - RNA, 23 nt, synthetic construct
  source 1..23: mol_type = other RNA
  modified_base 1: mod_base = OTHER; note = 2'-O-methyluridine-3'-phosphorothioate 5'-(E)-Vinylphosphonate
  modified_base 2: mod_base = OTHER; note = 2'-deoxy-2'-fluorouridine-3'-phosphorothioate
  modified_base 3: mod_base = OTHER; note = 2'-O-methyluridine-3'-phosphate
  modified_base 4: mod_base = OTHER; note = 2'-O-methyluridine-3'-phosphate
  modified_base 5: mod_base = OTHER; note = 2'-O-methyluridine-3'-phosphate
  modified_base 6: mod_base = OTHER; note = 2'-deoxy-2'-fluoroguanosine-3'-phosphate
  modified_base 7: mod_base = OTHER; note = 2'-O-methylguanosine-3'-phosphate
  modified_base 8: mod_base = OTHER; note = 2'-deoxy-2'-fluoroadenosine-3'-phosphate
  modified_base 9: mod_base = OTHER; note = 2'-deoxy-2'-fluoroadenosine-3'-phosphate
  modified_base 10: mod_base = OTHER; note = 2'-O-methyluridine-3'-phosphate
  modified_base 11: mod_base = OTHER; note = 2'-O-methylcytidine-3'-phosphate
  modified_base 12: mod_base = OTHER; note = 2'-O-methyluridine-3'-phosphate
  modified_base 13: mod_base = OTHER; note = 2'-O-methylcytidine-3'-phosphate
  modified_base 14: mod_base = OTHER; note = 2'-deoxy-2'-fluoroadenosine-3'-phosphate
  modified_base 15: mod_base = OTHER; note = 2'-O-methyluridine-3'-phosphate
  modified_base 16: mod_base = OTHER; note = 2'-deoxy-2'-fluoroadenosine-3'-phosphate
  modified_base 17: mod_base = OTHER; note = 2'-O-methyladenosine-3'-phosphate
  modified_base 18: mod_base = OTHER; note = 2'-O-methylguanosine-3'-phosphate
  modified_base 19: mod_base = OTHER; note = 2'-O-methylcytidine-3'-phosphate
  modified_base 20: mod_base = OTHER; note = 2'-O-methyladenosine-3'-phosphate
  modified_base 21: mod_base = OTHER; note = 2'-O-methylguanosine-3'-phosphorothioate
  modified_base 22: mod_base = OTHER; note = 2'-O-methylcytidine-3'-phosphorothioate
  modified_base 23: mod_base = OTHER; note = 2'-O-methylcytidine
tttttggaatctcataagcagcc

SEQ ID NO: 515 - RNA, 23 nt, synthetic construct
  source 1..23: mol_type = other RNA
  modified_base 1: mod_base = OTHER; note = 2'-O-methyluridine-3'-phosphorothioate 5'-(E)-Vinylphosphonate
  modified_base 2: mod_base = OTHER; note = 2'-deoxy-2'-fluorouridine-3'-phosphorothioate
  modified_base 3: mod_base = OTHER; note = 2'-O-methyluridine-3'-phosphate
  modified_base 4: mod_base = OTHER; note = 2'-O-methylguanosine-3'-phosphate
  modified_base 5: mod_base = OTHER; note = 2'-O-methylguanosine-3'-phosphate
  modified_base 6: mod_base = OTHER; note = 2'-deoxy-2'-fluorocytidine-3'-phosphate
  modified_base 7: mod_base = OTHER; note = 2'-O-methylcytidine-3'-phosphate
  modified_base 8: mod_base = OTHER; note = 2'-deoxy-2'-fluoroadenosine-3'-phosphate
  modified_base 9: mod_base = OTHER; note = 2'-deoxy-2'-fluoroadenosine-3'-phosphate
  modified_base 10: mod_base = OTHER; note = 2'-O-methylcytidine-3'-phosphate
  modified_base 11: mod_base = OTHER; note = 2'-O-methyladenosine-3'-phosphate
  modified_base 12: mod_base = OTHER; note = 2'-O-methylcytidine-3'-phosphate
  modified_base 13: mod_base = OTHER; note = 2'-O-methyluridine-3'-phosphate
  modified_base 14: mod_base = OTHER; note = 2'-deoxy-2'-fluorouridine-3'-phosphate
  modified_base 15: mod_base = OTHER; note = 2'-O-methylcytidine-3'-phosphate
  modified_base 16: mod_base = OTHER; note = 2'-deoxy-2'-fluoroadenosine-3'-phosphate
  modified_base 17: mod_base = OTHER; note = 2'-O-methyluridine-3'-phosphate
  modified_base 18: mod_base = OTHER; note = 2'-O-methyluridine-3'-phosphate
  modified_base 19: mod_base = OTHER; note = 2'-O-methyluridine-3'-phosphate
  modified_base 20: mod_base = OTHER; note = 2'-O-methyluridine-3'-phosphate
  modified_base 21: mod_base = OTHER; note = 2'-O-methylguanosine-3'-phosphorothioate
  modified_base 22: mod_base = OTHER; note = 2'-O-methylguanosine-3'-phosphorothioate
  modified_base 23: mod_base = OTHER; note = 2'-O-methyladenosine
tttggccaacacttcattttgga

SEQ ID NO: 516 - RNA, 23 nt, synthetic construct
  source 1..23: mol_type = other RNA
  modified_base 1: mod_base = OTHER; note = 2'-O-methyluridine-3'-phosphorothioate 5'-(E)-Vinylphosphonate
  modified_base 2: mod_base = OTHER; note = 2'-deoxy-2'-fluoroadenosine-3'-phosphorothioate
  modified_base 3: mod_base = OTHER; note = 2'-O-methylcytidine-3'-phosphate
  modified_base 4: mod_base = OTHER; note = 2'-O-methyluridine-3'-phosphate
  modified_base 5: mod_base = OTHER; note = 2'-O-methylguanosine-3'-phosphate
  modified_base 6: mod_base = OTHER; note = 2'-deoxy-2'-fluoroguanosine-3'-phosphate
  modified_base 7: mod_base = OTHER; note = 2'-O-methylguanosine-3'-phosphate
  modified_base 8: mod_base = OTHER; note = 2'-deoxy-2'-fluoroadenosine-3'-phosphate
  modified_base 9: mod_base = OTHER; note = 2'-deoxy-2'-fluoroadenosine-3'-phosphate
  modified_base 10: mod_base = OTHER; note = 2'-O-methyladenosine-3'-phosphate
  modified_base 11: mod_base = OTHER; note = 2'-O-methyladenosine-3'-phosphate
  modified_base 12: mod_base = OTHER; note = 2'-O-methyluridine-3'-phosphate
  modified_base 13: mod_base = OTHER; note = 2'-O-methylcytidine-3'-phosphate
  modified_base 14: mod_base = OTHER; note = 2'-deoxy-2'-fluorocytidine-3'-phosphate
  modified_base 15: mod_base = OTHER; note = 2'-O-methyladenosine-3'-phosphate
  modified_base 16: mod_base = OTHER; note = 2'-deoxy-2'-fluoroguanosine-3'-phosphate
  modified_base 17: mod_base = OTHER; note = 2'-O-methylguanosine-3'-phosphate
  modified_base 18: mod_base = OTHER; note = 2'-O-methyladenosine-3'-phosphate
  modified_base 19: mod_base = OTHER; note = 2'-O-methyluridine-3'-phosphate
  modified_base 20: mod_base = OTHER; note = 2'-O-methylguanosine-3'-phosphate
  modified_base 21: mod_base = OTHER; note = 2'-O-methylguanosine-3'-phosphorothioate
  modified_base 22: mod_base = OTHER; note = 2'-O-methylcytidine-3'-phosphorothioate
  modified_base 23: mod_base = OTHER; note = 2'-O-methylcytidine
tactgggaaaatccaggatggcc

SEQ ID NO: 517 - RNA, 23 nt, synthetic construct
  source 1..23: mol_type = other RNA
  modified_base 1: mod_base = OTHER; note = 2'-O-methyluridine-3'-phosphorothioate 5'-(E)-Vinylphosphonate
  modified_base 2: mod_base = OTHER; note = 2'-deoxy-2'-fluorocytidine-3'-phosphorothioate
  modified_base 3: mod_base = OTHER; note = 2'-O-methylguanosine-3'-phosphate
  modified_base 4: mod_base = OTHER; note = 2'-O-methyladenosine-3'-phosphate
  modified_base 5: mod_base = OTHER; note = 2'-O-methylguanosine-3'-phosphate
  modified_base 6: mod_base = OTHER; note = 2'-deoxy-2'-fluorocytidine-3'-phosphate
  modified_base 7: mod_base = OTHER; note = 2'-O-methyladenosine-3'-phosphate
  modified_base 8: mod_base = OTHER; note = 2'-deoxy-2'-fluoroguanosine-3'-phosphate
  modified_base 9: mod_base = OTHER; note = 2'-deoxy-2'-fluoroguanosine-3'-phosphate
  modified_base 10: mod_base = OTHER; note = 2'-O-methyladenosine-3'-phosphate
  modified_base 11: mod_base = OTHER; note = 2'-O-methyladenosine-3'-phosphate
  modified_base 12: mod_base = OTHER; note = 2'-O-methylguanosine-3'-phosphate
  modified_base 13: mod_base = OTHER; note = 2'-O-methylguanosine-3'-phosphate
  modified_base 14: mod_base = OTHER; note = 2'-deoxy-2'-fluoroguanosine-3'-phosphate
  modified_base 15: mod_base = OTHER; note = 2'-O-methyladenosine-3'-phosphate
  modified_base 16: mod_base = OTHER; note = 2'-deoxy-2'-fluoroadenosine-3'-phosphate
  modified_base 17: mod_base = OTHER; note = 2'-O-methylguanosine-3'-phosphate
  modified_base 18: mod_base = OTHER; note = 2'-O-methylcytidine-3'-phosphate
  modified_base 19: mod_base = OTHER; note = 2'-O-methylcytidine-3'-phosphate
  modified_base 20: mod_base = OTHER; note = 2'-O-methyladenosine-3'-phosphate
  modified_base 21: mod_base = OTHER; note = 2'-O-methylcytidine-3'-phosphorothioate
  modified_base 22: mod_base = OTHER; note = 2'-O-methyluridine-3'-phosphorothioate
  modified_base 23: mod_base = OTHER; note = 2'-O-methylguanosine
tcgagcaggaagggaagccactg

SEQ ID NO: 518 - RNA, 23 nt, synthetic construct
  source 1..23: mol_type = other RNA
  modified_base 1: mod_base = OTHER; note = 2'-O-methyluridine-3'-phosphorothioate 5'-(E)-Vinylphosphonate
  modified_base 2: mod_base = OTHER; note = 2'-deoxy-2'-fluoroguanosine-3'-phosphorothioate
  modified_base 3: mod_base = OTHER; note = 2'-O-methyladenosine-3'-phosphate
  modified_base 4: mod_base = OTHER; note = 2'-O-methylguanosine-3'-phosphate
  modified_base 5: mod_base = OTHER; note = 2'-O-methyladenosine-3'-phosphate
  modified_base 6: mod_base = OTHER; note = 2'-deoxy-2'-fluoroadenosine-3'-phosphate
  modified_base 7: mod_base = OTHER; note = 2'-O-methylguanosine-3'-phosphate
  modified_base 8: mod_base = OTHER; note = 2'-deoxy-2'-fluoroadenosine-3'-phosphate
  modified_base 9: mod_base = OTHER; note = 2'-deoxy-2'-fluoroguanosine-3'-phosphate
  modified_base 10: mod_base = OTHER; note = 2'-O-methyladenosine-3'-phosphate
  modified_base 11: mod_base = OTHER; note = 2'-O-methylguanosine-3'-phosphate
  modified_base 12: mod_base = OTHER; note = 2'-O-methylguanosine-3'-phosphate
  modified_base 13: mod_base = OTHER; note = 2'-O-methyluridine-3'-phosphate
  modified_base 14: mod_base = OTHER; note = 2'-deoxy-2'-fluorouridine-3'-phosphate
  modified_base 15: mod_base = OTHER; note = 2'-O-methyladenosine-3'-phosphate
  modified_base 16: mod_base = OTHER; note = 2'-deoxy-2'-fluoroadenosine-3'-phosphate
  modified_base 17: mod_base = OTHER; note = 2'-O-methylguanosine-3'-phosphate
  modified_base 18: mod_base = OTHER; note = 2'-O-methylcytidine-3'-phosphate
  modified_base 19: mod_base = OTHER; note = 2'-O-methyluridine-3'-phosphate
  modified_base 20: mod_base = OTHER; note = 2'-O-methyluridine-3'-phosphate
  modified_base 21: mod_base = OTHER; note = 2'-O-methyluridine-3'-phosphorothioate
  modified_base 22: mod_base = OTHER; note = 2'-O-methylcytidine-3'-phosphorothioate
  modified_base 23: mod_base = OTHER; note = 2'-O-methyluridine
tgagaagagaggttaagctttct

SEQ ID NO: 519 - RNA, 23 nt, synthetic construct
  source 1..23: mol_type = other RNA
  modified_base 1: mod_base = OTHER; note = 2'-O-methyluridine-3'-phosphorothioate 5'-(E)-Vinylphosphonate
  modified_base 2: mod_base = OTHER; note = 2'-deoxy-2'-fluoroadenosine-3'-phosphorothioate
  modified_base 3: mod_base = OTHER; note = 2'-O-methyluridine-3'-phosphate
  modified_base 4: mod_base = OTHER; note = 2'-O-methyluridine-3'-phosphate
  modified_base 5: mod_base = OTHER; note = 2'-O-methylcytidine-3'-phosphate
  modified_base 6: mod_base = OTHER; note = 2'-deoxy-2'-fluoroadenosine-3'-phosphate
  modified_base 7: mod_base = OTHER; note = 2'-O-methyladenosine-3'-phosphate
  modified_base 8: mod_base = OTHER; note = 2'-deoxy-2'-fluoroguanosine-3'-phosphate
  modified_base 9: mod_base = OTHER; note = 2'-deoxy-2'-fluoroguanosine-3'-phosphate
  modified_base 10: mod_base = OTHER; note = 2'-O-methyluridine-3'-phosphate
  modified_base 11: mod_base = OTHER; note = 2'-O-methylguanosine-3'-phosphate
  modified_base 12: mod_base = OTHER; note = 2'-O-methyladenosine-3'-phosphate
  modified_base 13: mod_base = OTHER; note = 2'-O-methyladenosine-3'-phosphate
  modified_base 14: mod_base = OTHER; note = 2'-deoxy-2'-fluoroadenosine-3'-phosphate
  modified_base 15: mod_base = OTHER; note = 2'-O-methylguanosine-3'-phosphate
  modified_base 16: mod_base = OTHER; note = 2'-deoxy-2'-fluoroguanosine-3'-phosphate
  modified_base 17: mod_base = OTHER; note = 2'-O-methyluridine-3'-phosphate
  modified_base 18: mod_base = OTHER; note = 2'-O-methyluridine-3'-phosphate
  modified_base 19: mod_base = OTHER; note = 2'-O-methyluridine-3'-phosphate
  modified_base 20: mod_base = OTHER; note = 2'-O-methylguanosine-3'-phosphate
  modified_base 21: mod_base = OTHER; note = 2'-O-methylguanosine-3'-phosphorothioate
  modified_base 22: mod_base = OTHER; note = 2'-O-methyladenosine-3'-phosphorothioate
  modified_base 23: mod_base = OTHER; note = 2'-O-methylguanosine
tattcaaggtgaaaggtttggag

SEQ ID NO: 520 - RNA, 23 nt, synthetic construct
  source 1..23: mol_type = other RNA
  modified_base 1: mod_base = OTHER; note = 2'-O-methyluridine-3'-phosphorothioate 5'-(E)-Vinylphosphonate
  modified_base 2: mod_base = OTHER; note = 2'-deoxy-2'-fluorocytidine-3'-phosphorothioate
  modified_base 3: mod_base = OTHER; note = 2'-O-methyladenosine-3'-phosphate
  modified_base 4: mod_base = OTHER; note = 2'-O-methylcytidine-3'-phosphate
  modified_base 5: mod_base = OTHER; note = 2'-O-methylcytidine-3'-phosphate
  modified_base 6: mod_base = OTHER; note = 2'-deoxy-2'-fluoroadenosine-3'-phosphate
  modified_base 7: mod_base = OTHER; note = 2'-O-methyladenosine-3'-phosphate
  modified_base 8: mod_base = OTHER; note = 2'-deoxy-2'-fluoroadenosine-3'-phosphate
  modified_base 9: mod_base = OTHER; note = 2'-deoxy-2'-fluorocytidine-3'-phosphate
  modified_base 10: mod_base = OTHER; note = 2'-O-methyladenosine-3'-phosphate
  modified_base 11: mod_base = OTHER; note = 2'-O-methyluridine-3'-phosphate
  modified_base 12: mod_base = OTHER; note = 2'-O-methyluridine-3'-phosphate
  modified_base 13: mod_base = OTHER; note = 2'-O-methyladenosine-3'-phosphate
  modified_base 14: mod_base = OTHER; note = 2'-deoxy-2'-fluorocytidine-3'-phosphate
  modified_base 15: mod_base = OTHER; note = 2'-O-methylcytidine-3'-phosphate
  modified_base 16: mod_base = OTHER; note = 2'-deoxy-2'-fluorocytidine-3'-phosphate
  modified_base 17: mod_base = OTHER; note = 2'-O-methyladenosine-3'-phosphate
  modified_base 18: mod_base = OTHER; note = 2'-O-methyluridine-3'-phosphate
  modified_base 19: mod_base = OTHER; note = 2'-O-methyluridine-3'-phosphate
  modified_base 20: mod_base = OTHER; note = 2'-O-methylcytidine-3'-phosphate
  modified_base 21: mod_base = OTHER; note = 2'-O-methyladenosine-3'-phosphorothioate
  modified_base 22: mod_base = OTHER; note = 2'-O-methyladenosine-3'-phosphorothioate
  modified_base 23: mod_base = OTHER; note = 2'-O-methylguanosine
tcaccaaacattacccattcaag

SEQ ID NO: 521 - RNA, 23 nt, synthetic construct
  source 1..23: mol_type = other RNA
  modified_base 1: mod_base = OTHER; note = 2'-O-methyluridine-3'-phosphorothioate 5'-(E)-Vinylphosphonate
  modified_base 2: mod_base = OTHER; note = 2'-deoxy-2'-fluoroguanosine-3'-phosphorothioate
  modified_base 3: mod_base = OTHER; note = 2'-O-methylguanosine-3'-phosphate
  modified_base 4: mod_base = OTHER; note = 2'-O-methylcytidine-3'-phosphate
  modified_base 5: mod_base = OTHER; note = 2'-O-methyluridine-3'-phosphate
  modified_base 6: mod_base = OTHER; note = 2'-deoxy-2'-fluorouridine-3'-phosphate
  modified_base 7: mod_base = OTHER; note = 2'-O-methylcytidine-3'-phosphate
  modified_base 8: mod_base = OTHER; note = 2'-deoxy-2'-fluorouridine-3'-phosphate
  modified_base 9: mod_base = OTHER; note = 2'-deoxy-2'-fluorocytidine-3'-phosphate
  modified_base 10: mod_base = OTHER; note = 2'-O-methylcytidine-3'-phosphate
  modified_base 11: mod_base = OTHER; note = 2'-O-methyladenosine-3'-phosphate
  modified_base 12: mod_base = OTHER; note = 2'-O-methyladenosine-3'-phosphate
  modified_base 13: mod_base = OTHER; note = 2'-O-methylguanosine-3'-phosphate
  modified_base 14: mod_base = OTHER; note = 2'-deoxy-2'-fluoroadenosine-3'-phosphate
  modified_base 15: mod_base = OTHER; note = 2'-O-methyladenosine-3'-phosphate
  modified_base 16: mod_base = OTHER; note = 2'-deoxy-2'-fluoroguanosine-3'-phosphate
  modified_base 17: mod_base = OTHER; note = 2'-O-methylguanosine-3'-phosphate
  modified_base 18: mod_base = OTHER; note = 2'-O-methyladenosine-3'-phosphate
  modified_base 19: mod_base = OTHER; note = 2'-O-methyladenosine-3'-phosphate
  modified_base 20: mod_base = OTHER; note = 2'-O-methylcytidine-3'-phosphate
  modified_base 21: mod_base = OTHER; note = 2'-O-methyladenosine-3'-phosphorothioate
  modified_base 22: mod_base = OTHER; note = 2'-O-methylguanosine-3'-phosphorothioate
  modified_base 23: mod_base = OTHER; note = 2'-O-methylcytidine
tggcttctccaagaaggaacagc

SEQ ID NO: 522 - RNA, 23 nt, synthetic construct
  source 1..23: mol_type = other RNA
  modified_base 1: mod_base = OTHER; note = 2'-O-methyluridine-3'-phosphorothioate 5'-(E)-Vinylphosphonate
  modified_base 2: mod_base = OTHER; note = 2'-deoxy-2'-fluoroadenosine-3'-phosphorothioate
  modified_base 3: mod_base = OTHER; note = 2'-O-methyladenosine-3'-phosphate
  modified_base 4: mod_base = OTHER; note = 2'-O-methyladenosine-3'-phosphate
  modified_base 5: mod_base = OTHER; note = 2'-O-methyladenosine-3'-phosphate
  modified_base 6: mod_base = OTHER; note = 2'-deoxy-2'-fluorouridine-3'-phosphate
  modified_base 7: mod_base = OTHER; note = 2'-O-methylguanosine-3'-phosphate
  modified_base 8: mod_base = OTHER; note = 2'-deoxy-2'-fluoroguanosine-3'-phosphate
  modified_base 9: mod_base = OTHER; note = 2'-deoxy-2'-fluorouridine-3'-phosphate
  modified_base 10: mod_base = OTHER; note = 2'-O-methylcytidine-3'-phosphate
  modified_base 11: mod_base = OTHER; note = 2'-O-methylcytidine-3'-phosphate
  modified_base 12: mod_base = OTHER; note = 2'-O-methylguanosine-3'-phosphate
  modified_base 13: mod_base = OTHER; note = 2'-O-methyladenosine-3'-phosphate
  modified_base 14: mod_base = OTHER; note = 2'-deoxy-2'-fluorocytidine-3'-phosphate
  modified_base 15: mod_base = OTHER; note = 2'-O-methyluridine-3'-phosphate
  modified_base 16: mod_base = OTHER; note = 2'-deoxy-2'-fluorocytidine-3'-phosphate
  modified_base 17: mod_base = OTHER; note = 2'-O-methyladenosine-3'-phosphate
  modified_base 18: mod_base = OTHER; note = 2'-O-methyladenosine-3'-phosphate
  modified_base 19: mod_base = OTHER; note = 2'-O-methylguanosine-3'-phosphate
  modified_base 20: mod_base = OTHER; note = 2'-O-methylguanosine-3'-phosphate
  modified_base 21: mod_base = OTHER; note = 2'-O-methylcytidine-3'-phosphorothioate
  modified_base 22: mod_base = OTHER; note = 2'-O-methyluridine-3'-phosphorothioate
  modified_base 23: mod_base = OTHER; note = 2'-O-methyluridine
taaaatggtccgactcaaggctt

SEQ ID NO: 523 - RNA, 23 nt, synthetic construct
  source 1..23: mol_type = other RNA
  modified_base 1: mod_base = OTHER; note = 2'-O-methyluridine-3'-phosphorothioate 5'-(E)-Vinylphosphonate
  modified_base 2: mod_base = OTHER; note = 2'-deoxy-2'-fluoroadenosine-3'-phosphorothioate
  modified_base 3: mod_base = OTHER; note = 2'-O-methyluridine-3'-phosphate
  modified_base 4: mod_base = OTHER; note = 2'-O-methyluridine-3'-phosphate
  modified_base 5: mod_base = OTHER; note = 2'-O-methyluridine-3'-phosphate
  modified_base 6: mod_base = OTHER; note = 2'-deoxy-2'-fluorouridine-3'-phosphate
  modified_base 7: mod_base = OTHER; note = 2'-O-methylcytidine-3'-phosphate
  modified_base 8: mod_base = OTHER; note = 2'-deoxy-2'-fluoroadenosine-3'-phosphate
  modified_base 9: mod_base = OTHER; note = 2'-deoxy-2'-fluorocytidine-3'-phosphate
  modified_base 10: mod_base = OTHER; note = 2'-O-methyluridine-3'-phosphate
  modified_base 11: mod_base = OTHER; note = 2'-O-methyluridine-3'-phosphate
  modified_base 12: mod_base = OTHER; note = 2'-O-methylcytidine-3'-phosphate
  modified_base 13: mod_base = OTHER; note = 2'-O-methyluridine-3'-phosphate
  modified_base 14: mod_base = OTHER; note = 2'-deoxy-2'-fluorouridine-3'-phosphate
  modified_base 15: mod_base = OTHER; note = 2'-O-methylcytidine-3'-phosphate
  modified_base 16: mod_base = OTHER; note = 2'-deoxy-2'-fluoroadenosine-3'-phosphate
  modified_base 17: mod_base = OTHER; note = 2'-O-methyluridine-3'-phosphate
  modified_base 18: mod_base = OTHER; note = 2'-O-methylcytidine-3'-phosphate
  modified_base 19: mod_base = OTHER; note = 2'-O-methylcytidine-3'-phosphate
  modified_base 20: mod_base = OTHER; note = 2'-O-methyluridine-3'-phosphate
  modified_base 21: mod_base = OTHER; note = 2'-O-methyluridine-3'-phosphorothioate
  modified_base 22: mod_base = OTHER; note = 2'-O-methylcytidine-3'-phosphorothioate
  modified_base 23: mod_base = OTHER; note = 2'-O-methylcytidine
tattttcacttcttcatccttcc

SEQ ID NO: 524 - RNA, 23 nt, synthetic construct
  source 1..23: mol_type = other RNA
  modified_base 1: mod_base = OTHER; note = 2'-O-methyluridine-3'-phosphorothioate 5'-(E)-Vinylphosphonate
  modified_base 2: mod_base = OTHER; note = 2'-deoxy-2'-fluorouridine-3'-phosphorothioate
  modified_base 3: mod_base = OTHER; note = 2'-O-methyluridine-3'-phosphate
  modified_base 4: mod_base = OTHER; note = 2'-O-methylguanosine-3'-phosphate
  modified_base 5: mod_base = OTHER; note = 2'-O-methyladenosine-3'-phosphate
  modified_base 6: mod_base = OTHER; note = 2'-deoxy-2'-fluoroguanosine-3'-phosphate
  modified_base 7: mod_base = OTHER; note = 2'-O-methyladenosine-3'-phosphate
  modified_base 8: mod_base = OTHER; note = 2'-deoxy-2'-fluoroguanosine-3'-phosphate
  modified_base 9: mod_base = OTHER; note = 2'-deoxy-2'-fluorouridine-3'-phosphate
  modified_base 10: mod_base = OTHER; note = 2'-O-methylcytidine-3'-phosphate
  modified_base 11: mod_base = OTHER; note = 2'-O-methyladenosine-3'-phosphate
  modified_base 12: mod_base = OTHER; note = 2'-O-methyluridine-3'-phosphate
  modified_base 13: mod_base = OTHER; note = 2'-O-methyluridine-3'-phosphate
  modified_base 14: mod_base = OTHER; note = 2'-deoxy-2'-fluoroadenosine-3'-phosphate
  modified_base 15: mod_base = OTHER; note = 2'-O-methyluridine-3'-phosphate
  modified_base 16: mod_base = OTHER; note = 2'-deoxy-2'-fluorouridine-3'-phosphate
  modified_base 17: mod_base = OTHER; note = 2'-O-methylguanosine-3'-phosphate
  modified_base 18: mod_base = OTHER; note = 2'-O-methyluridine-3'-phosphate
  modified_base 19: mod_base = OTHER; note = 2'-O-methylcytidine-3'-phosphate
  modified_base 20: mod_base = OTHER; note = 2'-O-methyladenosine-3'-phosphate
  modified_base 21: mod_base = OTHER; note = 2'-O-methyluridine-3'-phosphorothioate
  modified_base 22: mod_base = OTHER; note = 2'-O-methyluridine-3'-phosphorothioate
  modified_base 23: mod_base = OTHER; note = 2'-O-methyluridine
tttgagagtcattattgtcattt

SEQ ID NO: 525 - RNA, 23 nt, synthetic construct
  source 1..23: mol_type = other RNA
  modified_base 1: mod_base = OTHER; note = 2'-O-methyluridine-3'-phosphorothioate 5'-(E)-Vinylphosphonate
  modified_base 2: mod_base = OTHER; note = 2'-deoxy-2'-fluorocytidine-3'-phosphorothioate
  modified_base 3: mod_base = OTHER; note = 2'-O-methyladenosine-3'-phosphate
  modified_base 4: mod_base = OTHER; note = 2'-O-methylguanosine-3'-phosphate
  modified_base 5: mod_base = OTHER; note = 2'-O-methyluridine-3'-phosphate
  modified_base 6: mod_base = OTHER; note = 2'-deoxy-2'-fluorouridine-3'-phosphate
  modified_base 7: mod_base = OTHER; note = 2'-O-methylcytidine-3'-phosphate
  modified_base 8: mod_base = OTHER; note = 2'-deoxy-2'-fluorouridine-3'-phosphate
  modified_base 9: mod_base = OTHER; note = 2'-deoxy-2'-fluoroadenosine-3'-phosphate
  modified_base 10: mod_base = OTHER; note = 2'-O-methylcytidine-3'-phosphate
  modified_base 11: mod_base = OTHER; note = 2'-O-methyladenosine-3'-phosphate
  modified_base 12: mod_base = OTHER; note = 2'-O-methyluridine-3'-phosphate
  modified_base 13: mod_base = OTHER; note = 2'-O-methyluridine-3'-phosphate
  modified_base 14: mod_base = OTHER; note = 2'-deoxy-2'-fluorouridine-3'-phosphate
  modified_base 15: mod_base = OTHER; note = 2'-O-methylguanosine-3'-phosphate
  modified_base 16: mod_base = OTHER; note = 2'-deoxy-2'-fluorocytidine-3'-phosphate
  modified_base 17: mod_base = OTHER; note = 2'-O-methylcytidine-3'-phosphate
  modified_base 18: mod_base = OTHER; note = 2'-O-methyladenosine-3'-phosphate
  modified_base 19: mod_base = OTHER; note = 2'-O-methyluridine-3'-phosphate
  modified_base 20: mod_base = OTHER; note = 2'-O-methylguanosine-3'-phosphate
  modified_base 21: mod_base = OTHER; note = 2'-O-methyluridine-3'-phosphorothioate
  modified_base 22: mod_base = OTHER; note = 2'-O-methylcytidine-3'-phosphorothioate
  modified_base 23: mod_base = OTHER; note = 2'-O-methyladenosine
tcagttctacatttgccatgtca

SEQ ID NO: 526 - RNA, 23 nt, synthetic construct
  source 1..23: mol_type = other RNA
  modified_base 1: mod_base = OTHER; note = 2'-O-methyluridine-3'-phosphorothioate 5'-(E)-Vinylphosphonate
  modified_base 2: mod_base = OTHER; note = 2'-deoxy-2'-fluoroguanosine-3'-phosphorothioate
  modified_base 3: mod_base = OTHER; note = 2'-O-methyluridine-3'-phosphate
  modified_base 4: mod_base = OTHER; note = 2'-O-methyluridine-3'-phosphate
  modified_base 5: mod_base = OTHER; note = 2'-O-methyluridine-3'-phosphate
  modified_base 6: mod_base = OTHER; note = 2'-deoxy-2'-fluoroguanosine-3'-phosphate
  modified_base 7: mod_base = OTHER; note = 2'-O-methyluridine-3'-phosphate
  modified_base 8: mod_base = OTHER; note = 2'-deoxy-2'-fluorouridine-3'-phosphate
  modified_base 9: mod_base = OTHER; note = 2'-deoxy-2'-fluorocytidine-3'-phosphate
  modified_base 10: mod_base = OTHER; note = 2'-O-methyladenosine-3'-phosphate
  modified_base 11: mod_base = OTHER; note = 2'-O-methyladenosine-3'-phosphate
  modified_base 12: mod_base = OTHER; note = 2'-O-methyluridine-3'-phosphate
  modified_base 13: mod_base = OTHER; note = 2'-O-methyluridine-3'-phosphate
  modified_base 14: mod_base = OTHER; note = 2'-deoxy-2'-fluorouridine-3'-phosphate
  modified_base 15: mod_base = OTHER; note = 2'-O-methyladenosine-3'-phosphate
  modified_base 16: mod_base = OTHER; note = 2'-deoxy-2'-fluoroadenosine-3'-phosphate
  modified_base 17: mod_base = OTHER; note = 2'-O-methylguanosine-3'-phosphate
  modified_base 18: mod_base = OTHER; note = 2'-O-methyluridine-3'-phosphate
  modified_base 19: mod_base = OTHER; note = 2'-O-methylcytidine-3'-phosphate
  modified_base 20: mod_base = OTHER; note = 2'-O-methyladenosine-3'-phosphate
  modified_base 21: mod_base = OTHER; note = 2'-O-methylguanosine-3'-phosphorothioate
  modified_base 22: mod_base = OTHER; note = 2'-O-methyluridine-3'-phosphorothioate
  modified_base 23: mod_base = OTHER; note = 2'-O-methyluridine
tgtttgttcaatttaagtcagtt

SEQ ID NO: 527 - RNA, 23 nt, synthetic construct
  source 1..23: mol_type = other RNA
  modified_base 1: mod_base = OTHER; note = 2'-O-methyluridine-3'-phosphorothioate 5'-(E)-Vinylphosphonate
  modified_base 2: mod_base = OTHER; note = 2'-deoxy-2'-fluoroadenosine-3'-phosphorothioate
  modified_base 3: mod_base = OTHER; note = 2'-O-methylguanosine-3'-phosphate
  modified_base 4: mod_base = OTHER; note = 2'-O-methylguanosine-3'-phosphate
  modified_base 5: mod_base = OTHER; note = 2'-O-methyluridine-3'-phosphate
  modified_base 6: mod_base = OTHER; note = 2'-deoxy-2'-fluoroguanosine-3'-phosphate
  modified_base 7: mod_base = OTHER; note = 2'-O-methylcytidine-3'-phosphate
  modified_base 8: mod_base = OTHER; note = 2'-deoxy-2'-fluorouridine-3'-phosphate
  modified_base 9: mod_base = OTHER; note = 2'-deoxy-2'-fluorocytidine-3'-phosphate
  modified_base 10: mod_base = OTHER; note = 2'-O-methyladenosine-3'-phosphate
  modified_base 11: mod_base = OTHER; note = 2'-O-methyladenosine-3'-phosphate
  modified_base 12: mod_base = OTHER; note = 2'-O-methylcytidine-3'-phosphate
  modified_base 13: mod_base = OTHER; note = 2'-O-methyladenosine-3'-phosphate
  modified_base 14: mod_base = OTHER; note = 2'-deoxy-2'-fluorouridine-3'-phosphate
  modified_base 15: mod_base = OTHER; note = 2'-O-methylcytidine-3'-phosphate
  modified_base 16: mod_base = OTHER; note = 2'-deoxy-2'-fluoroadenosine-3'-phosphate
  modified_base 17: mod_base = OTHER; note = 2'-O-methylguanosine-3'-phosphate
  modified_base 18: mod_base = OTHER; note = 2'-O-methyladenosine-3'-phosphate
  modified_base 19: mod_base = OTHER; note = 2'-O-methylguanosine-3'-phosphate
  modified_base 20: mod_base = OTHER; note = 2'-O-methylguanosine-3'-phosphate
  modified_base 21: mod_base = OTHER; note = 2'-O-methyluridine-3'-phosphorothioate
  modified_base 22: mod_base = OTHER; note = 2'-O-methylguanosine-3'-phosphorothioate
  modified_base 23: mod_base = OTHER; note = 2'-O-methylcytidine
taggtgctcaacatcagaggtgc

SEQ ID NO: 528 - RNA, 23 nt, synthetic construct
  source 1..23: mol_type = other RNA
  modified_base 1: mod_base = OTHER; note = 2'-O-methyluridine-3'-phosphorothioate 5'-(E)-Vinylphosphonate
  modified_base 2: mod_base = OTHER; note = 2'-deoxy-2'-fluorocytidine-3'-phosphorothioate
  modified_base 3: mod_base = OTHER; note = 2'-O-methyladenosine-3'-phosphate
  modified_base 4: mod_base = OTHER; note = 2'-O-methyluridine-3'-phosphate
  modified_base 5: mod_base = OTHER; note = 2'-O-methyluridine-3'-phosphate
  modified_base 6: mod_base = OTHER; note = 2'-deoxy-2'-fluorocytidine-3'-phosphate
  modified_base 7: mod_base = OTHER; note = 2'-O-methyladenosine-3'-phosphate
  modified_base 8: mod_base = OTHER; note = 2'-deoxy-2'-fluoroguanosine-3'-phosphate
  modified_base 9: mod_base = OTHER; note = 2'-deoxy-2'-fluorouridine-3'-phosphate
  modified_base 10: mod_base = OTHER; note = 2'-O-methylguanosine-3'-phosphate
  modified_base 11: mod_base = OTHER; note = 2'-O-methylcytidine-3'-phosphate
  modified_base 12: mod_base = OTHER; note = 2'-O-methyluridine-3'-phosphate
  modified_base 13: mod_base = OTHER; note = 2'-O-methylcytidine-3'-phosphate
  modified_base 14: mod_base = OTHER; note = 2'-deoxy-2'-fluoroadenosine-3'-phosphate
  modified_base 15: mod_base = OTHER; note = 2'-O-methylguanosine-3'-phosphate
  modified_base 16: mod_base = OTHER; note = 2'-deoxy-2'-fluorouridine-3'-phosphate
  modified_base 17: mod_base = OTHER; note = 2'-O-methyladenosine-3'-phosphate
  modified_base 18: mod_base = OTHER; note = 2'-O-methyluridine-3'-phosphate
  modified_base 19: mod_base = OTHER; note = 2'-O-methyluridine-3'-phosphate
  modified_base 20: mod_base = OTHER; note = 2'-O-methylcytidine-3'-phosphate
  modified_base 21: mod_base = OTHER; note = 2'-O-methyladenosine-3'-phosphorothioate
  modified_base 22: mod_base = OTHER; note = 2'-O-methylguanosine-3'-phosphorothioate
  modified_base 23: mod_base = OTHER; note = 2'-O-methylcytidine
tcattcagtgctcagtattcagc

SEQ ID NO: 529 - RNA, 23 nt, synthetic construct
  source 1..23: mol_type = other RNA
  modified_base 1: mod_base = OTHER; note = 2'-O-methyluridine-3'-phosphorothioate 5'-(E)-Vinylphosphonate
  modified_base 2: mod_base = OTHER; note = 2'-deoxy-2'-fluorouridine-3'-phosphorothioate
  modified_base 3: mod_base = OTHER; note = 2'-O-methyladenosine-3'-phosphate
  modified_base 4: mod_base = OTHER; note = 2'-O-methyluridine-3'-phosphate
  modified_base 5: mod_base = OTHER; note = 2'-O-methyluridine-3'-phosphate
  modified_base 6: mod_base = OTHER; note = 2'-deoxy-2'-fluoroguanosine-3'-phosphate
  modified_base 7: mod_base = OTHER; note = 2'-O-methylguanosine-3'-phosphate
  modified_base 8: mod_base = OTHER; note = 2'-deoxy-2'-fluorouridine-3'-phosphate
  modified_base 9: mod_base = OTHER; note = 2'-deoxy-2'-fluoroadenosine-3'-phosphate
  modified_base 10: mod_base = OTHER; note = 2'-O-methylguanosine-3'-phosphate
  modified_base 11: mod_base = OTHER; note = 2'-O-methylguanosine-3'-phosphate
  modified_base 12: mod_base = OTHER; note = 2'-O-methylcytidine-3'-phosphate
  modified_base 13: mod_base = OTHER; note = 2'-O-methyladenosine-3'-phosphate
  modified_base 14: mod_base = OTHER; note = 2'-deoxy-2'-fluorouridine-3'-phosphate
  modified_base 15: mod_base = OTHER; note = 2'-O-methyladenosine-3'-phosphate
  modified_base 16: mod_base = OTHER; note = 2'-deoxy-2'-fluorouridine-3'-phosphate
  modified_base 17: mod_base = OTHER; note = 2'-O-methylcytidine-3'-phosphate
  modified_base 18: mod_base = OTHER; note = 2'-O-methylcytidine-3'-phosphate
  modified_base 19: mod_base = OTHER; note = 2'-O-methylcytidine-3'-phosphate
  modified_base 20: mod_base = OTHER; note = 2'-O-methyluridine-3'-phosphate
  modified_base 21: mod_base = OTHER; note = 2'-O-methylguanosine-3'-phosphorothioate
  modified_base 22: mod_base = OTHER; note = 2'-O-methyladenosine-3'-phosphorothioate
  modified_base 23: mod_base = OTHER; note = 2'-O-methylguanosine
ttattggtaggcatatccctgag

SEQ ID NO: 530 - RNA, 23 nt, synthetic construct
  source 1..23: mol_type = other RNA
  modified_base 1: mod_base = OTHER; note = 2'-O-methyluridine-3'-phosphorothioate 5'-(E)-Vinylphosphonate
  modified_base 2: mod_base = OTHER; note = 2'-deoxy-2'-fluorouridine-3'-phosphorothioate
  modified_base 3: mod_base = OTHER; note = 2'-O-methyluridine-3'-phosphate
  modified_base 4: mod_base = OTHER; note = 2'-O-methyladenosine-3'-phosphate
  modified_base 5: mod_base = OTHER; note = 2'-O-methyluridine-3'-phosphate
  modified_base 6: mod_base = OTHER; note = 2'-deoxy-2'-fluoroguanosine-3'-phosphate
  modified_base 7: mod_base = OTHER; note = 2'-O-methyluridine-3'-phosphate
  modified_base 8: mod_base = OTHER; note = 2'-deoxy-2'-fluorouridine-3'-phosphate
  modified_base 9: mod_base = OTHER; note = 2'-deoxy-2'-fluorouridine-3'-phosphate
  modified_base 10: mod_base = OTHER; note = 2'-O-methylguanosine-3'-phosphate
  modified_base 11: mod_base = OTHER; note = 2'-O-methylguanosine-3'-phosphate
  modified_base 12: mod_base = OTHER; note = 2'-O-methylguanosine-3'-phosphate
  modified_base 13: mod_base = OTHER; note = 2'-O-methyluridine-3'-phosphate
  modified_base 14: mod_base = OTHER; note = 2'-deoxy-2'-fluoroadenosine-3'-phosphate
  modified_base 15: mod_base = OTHER; note = 2'-O-methylcytidine-3'-phosphate
  modified_base 16: mod_base = OTHER; note = 2'-deoxy-2'-fluoroadenosine-3'-phosphate
  modified_base 17: mod_base = OTHER; note = 2'-O-methyluridine-3'-phosphate
  modified_base 18: mod_base = OTHER; note = 2'-O-methylguanosine-3'-phosphate
  modified_base 19: mod_base = OTHER; note = 2'-O-methylcytidine-3'-phosphate
  modified_base 20: mod_base = OTHER; note = 2'-O-methylcytidine-3'-phosphate
  modified_base 21: mod_base = OTHER; note = 2'-O-methyluridine-3'-phosphorothioate
  modified_base 22: mod_base = OTHER; note = 2'-O-methyluridine-3'-phosphorothioate
  modified_base 23: mod_base = OTHER; note = 2'-O-methyladenosine
tttatgtttgggtacatgcctta

SEQ ID NO: 531 - RNA, 23 nt, synthetic construct
  source 1..23: mol_type = other RNA
  modified_base 1: mod_base = OTHER; note = 2'-O-methyluridine-3'-phosphorothioate 5'-(E)-Vinylphosphonate
  modified_base 2: mod_base = OTHER; note = 2'-deoxy-2'-fluoroadenosine-3'-phosphorothioate
  modified_base 3: mod_base = OTHER; note = 2'-O-methylcytidine-3'-phosphate
  modified_base 4: mod_base = OTHER; note = 2'-O-methyluridine-3'-phosphate
  modified_base 5: mod_base = OTHER; note = 2'-O-methyluridine-3'-phosphate
  modified_base 6: mod_base = OTHER; note = 2'-deoxy-2'-fluorouridine-3'-phosphate
  modified_base 7: mod_base = OTHER; note = 2'-O-methylcytidine-3'-phosphate
  modified_base 8: mod_base = OTHER; note = 2'-deoxy-2'-fluorouridine-3'-phosphate
  modified_base 9: mod_base = OTHER; note = 2'-deoxy-2'-fluoroguanosine-3'-phosphate
  modified_base 10: mod_base = OTHER; note = 2'-O-methylcytidine-3'-phosphate
  modified_base 11: mod_base = OTHER; note = 2'-O-methylcytidine-3'-phosphate
  modified_base 12: mod_base = OTHER; note = 2'-O-methyluridine-3'-phosphate
  modified_base 13: mod_base = OTHER; note = 2'-O-methyluridine-3'-phosphate
  modified_base 14: mod_base = OTHER; note = 2'-deoxy-2'-fluoroadenosine-3'-phosphate
  modified_base 15: mod_base = OTHER; note = 2'-O-methylcytidine-3'-phosphate
  modified_base 16: mod_base = OTHER; note = 2'-deoxy-2'-fluoroadenosine-3'-phosphate
  modified_base 17: mod_base = OTHER; note = 2'-O-methyluridine-3'-phosphate
  modified_base 18: mod_base = OTHER; note = 2'-O-methylcytidine-3'-phosphate
  modified_base 19: mod_base = OTHER; note = 2'-O-methylcytidine-3'-phosphate
  modified_base 20: mod_base = OTHER; note = 2'-O-methylguanosine-3'-phosphate
  modified_base 21: mod_base = OTHER; note = 2'-O-methyluridine-3'-phosphorothioate
  modified_base 22: mod_base = OTHER; note = 2'-O-methyluridine-3'-phosphorothioate
  modified_base 23: mod_base = OTHER; note = 2'-O-methyladenosine
tactttctgccttacatccgtta

SEQ ID NO: 532 - RNA, 23 nt, synthetic construct
  source 1..23: mol_type = other RNA
  modified_base 1: mod_base = OTHER; note = 2'-O-methyluridine-3'-phosphorothioate 5'-(E)-Vinylphosphonate
  modified_base 2: mod_base = OTHER; note = 2'-deoxy-2'-fluorouridine-3'-phosphorothioate
  modified_base 3: mod_base = OTHER; note = 2'-O-methyluridine-3'-phosphate
  modified_base 4: mod_base = OTHER; note = 2'-O-methyluridine-3'-phosphate
  modified_base 5: mod_base = OTHER; note = 2'-O-methylcytidine-3'-phosphate
  modified_base 6: mod_base = OTHER; note = 2'-deoxy-2'-fluorouridine-3'-phosphate
  modified_base 7: mod_base = OTHER; note = 2'-O-methylcytidine-3'-phosphate
  modified_base 8: mod_base = OTHER; note = 2'-deoxy-2'-fluoroadenosine-3'-phosphate
  modified_base 9: mod_base = OTHER; note = 2'-deoxy-2'-fluorouridine-3'-phosphate
  modified_base 10: mod_base = OTHER; note = 2'-O-methyluridine-3'-phosphate
  modified_base 11: mod_base = OTHER; note = 2'-O-methylcytidine-3'-phosphate
  modified_base 12: mod_base = OTHER; note = 2'-O-methylcytidine-3'-phosphate
  modified_base 13: mod_base = OTHER; note = 2'-O-methyluridine-3'-phosphate
  modified_base 14: mod_base = OTHER; note = 2'-deoxy-2'-fluorouridine-3'-phosphate
  modified_base 15: mod_base = OTHER; note = 2'-O-methylcytidine-3'-phosphate
  modified_base 16: mod_base = OTHER; note = 2'-deoxy-2'-fluorouridine-3'-phosphate
  modified_base 17: mod_base = OTHER; note = 2'-O-methylcytidine-3'-phosphate
  modified_base 18: mod_base = OTHER; note = 2'-O-methylcytidine-3'-phosphate
  modified_base 19: mod_base = OTHER; note = 2'-O-methylguanosine-3'-phosphate
  modified_base 20: mod_base = OTHER; note = 2'-O-methyladenosine-3'-phosphate
  modified_base 21: mod_base = OTHER; note = 2'-O-methyluridine-3'-phosphorothioate
  modified_base 22: mod_base = OTHER; note = 2'-O-methylcytidine-3'-phosphorothioate
  modified_base 23: mod_base = OTHER; note = 2'-O-methyladenosine
ttttctcattccttctccgatca

SEQ ID NO: 533 - RNA, 23 nt, synthetic construct
  source 1..23: mol_type = other RNA
  modified_base 1: mod_base = OTHER; note = 2'-O-methyluridine-3'-phosphorothioate 5'-(E)-Vinylphosphonate
  modified_base 2: mod_base = OTHER; note = 2'-deoxy-2'-fluorouridine-3'-phosphorothioate
  modified_base 3: mod_base = OTHER; note = 2'-O-methylguanosine-3'-phosphate
  modified_base 4: mod_base = OTHER; note = 2'-O-methyladenosine-3'-phosphate
  modified_base 5: mod_base = OTHER; note = 2'-O-methylcytidine-3'-phosphate
  modified_base 6: mod_base = OTHER; note = 2'-deoxy-2'-fluorouridine-3'-phosphate
  modified_base 7: mod_base = OTHER; note = 2'-O-methyluridine-3'-phosphate
  modified_base 8: mod_base = OTHER; note = 2'-deoxy-2'-fluorouridine-3'-phosphate
  modified_base 9: mod_base = OTHER; note = 2'-deoxy-2'-fluorouridine-3'-phosphate
  modified_base 10: mod_base = OTHER; note = 2'-O-methylcytidine-3'-phosphate
  modified_base 11: mod_base = OTHER; note = 2'-O-methyladenosine-3'-phosphate
  modified_base 12: mod_base = OTHER; note = 2'-O-methyluridine-3'-phosphate
  modified_base 13: mod_base = OTHER; note = 2'-O-methyluridine-3'-phosphate
  modified_base 14: mod_base = OTHER; note = 2'-deoxy-2'-fluoroadenosine-3'-phosphate
  modified_base 15: mod_base = OTHER; note = 2'-O-methyladenosine-3'-phosphate
  modified_base 16: mod_base = OTHER; note = 2'-deoxy-2'-fluorocytidine-3'-phosphate
  modified_base 17: mod_base = OTHER; note = 2'-O-methyladenosine-3'-phosphate
  modified_base 18: mod_base = OTHER; note = 2'-O-methyluridine-3'-phosphate
  modified_base 19: mod_base = OTHER; note = 2'-O-methylcytidine-3'-phosphate
  modified_base 20: mod_base = OTHER; note = 2'-O-methyladenosine-3'-phosphate
  modified_base 21: mod_base = OTHER; note = 2'-O-methylcytidine-3'-phosphorothioate
  modified_base 22: mod_base = OTHER; note = 2'-O-methylguanosine-3'-phosphorothioate
  modified_base 23: mod_base = OTHER; note = 2'-O-methylcytidine
ttgacttttcattaacatcacgc

SEQ ID NO: 534 - RNA, 23 nt, synthetic construct
  source 1..23: mol_type = other RNA
  modified_base 1: mod_base = OTHER; note = 2'-O-methyluridine-3'-phosphorothioate 5'-(E)-Vinylphosphonate
  modified_base 2: mod_base = OTHER; note = 2'-deoxy-2'-fluorouridine-3'-phosphorothioate
  modified_base 3: mod_base = OTHER; note = 2'-O-methylguanosine-3'-phosphate
  modified_base 4: mod_base = OTHER; note = 2'-O-methylcytidine-3'-phosphate
  modified_base 5: mod_base = OTHER; note = 2'-O-methyluridine-3'-phosphate
  modified_base 6: mod_base = OTHER; note = 2'-deoxy-2'-fluorocytidine-3'-phosphate
  modified_base 7: mod_base = OTHER; note = 2'-O-methyluridine-3'-phosphate
  modified_base 8: mod_base = OTHER; note = 2'-deoxy-2'-fluoroadenosine-3'-phosphate
  modified_base 9: mod_base = OTHER; note = 2'-deoxy-2'-fluoroguanosine-3'-phosphate
  modified_base 10: mod_base = OTHER; note = 2'-O-methylcytidine-3'-phosphate
  modified_base 11: mod_base = OTHER; note = 2'-O-methyluridine-3'-phosphate
  modified_base 12: mod_base = OTHER; note = 2'-O-methylguanosine-3'-phosphate
  modified_base 13: mod_base = OTHER; note = 2'-O-methylcytidine-3'-phosphate
  modified_base 14: mod_base = OTHER; note = 2'-deoxy-2'-fluoroadenosine-3'-phosphate
  modified_base 15: mod_base = OTHER; note = 2'-O-methyluridine-3'-phosphate
  modified_base 16: mod_base = OTHER; note = 2'-deoxy-2'-fluoroadenosine-3'-phosphate
  modified_base 17: mod_base = OTHER; note = 2'-O-methyluridine-3'-phosphate
  modified_base 18: mod_base = OTHER; note = 2'-O-methylguanosine-3'-phosphate
  modified_base 19: mod_base = OTHER; note = 2'-O-methyladenosine-3'-phosphate
  modified_base 20: mod_base = OTHER; note = 2'-O-methylcytidine-3'-phosphate
  modified_base 21: mod_base = OTHER; note = 2'-O-methyluridine-3'-phosphorothioate
  modified_base 22: mod_base = OTHER; note = 2'-O-methyluridine-3'-phosphorothioate
  modified_base 23: mod_base = OTHER; note = 2'-O-methyluridine
ttgctctagctgcatatgacttt

SEQ ID NO: 535 - RNA, 23 nt, synthetic construct
  source 1..23: mol_type = other RNA
  modified_base 1: mod_base = OTHER; note = 2'-O-methyluridine-3'-phosphorothioate 5'-(E)-Vinylphosphonate
  modified_base 2: mod_base = OTHER; note = 2'-deoxy-2'-fluoroadenosine-3'-phosphorothioate
  modified_base 3: mod_base = OTHER; note = 2'-O-methyluridine-3'-phosphate
  modified_base 4: mod_base = OTHER; note = 2'-O-methylguanosine-3'-phosphate
  modified_base 5: mod_base = OTHER; note = 2'-O-methylcytidine-3'-phosphate
  modified_base 6: mod_base = OTHER; note = 2'-deoxy-2'-fluoroadenosine-3'-phosphate
  modified_base 7: mod_base = OTHER; note = 2'-O-methyladenosine-3'-phosphate
  modified_base 8: mod_base = OTHER; note = 2'-deoxy-2'-fluorouridine-3'-phosphate
  modified_base 9: mod_base = OTHER; note = 2'-deoxy-2'-fluorocytidine-3'-phosphate
  modified_base 10: mod_base = OTHER; note = 2'-O-methyluridine-3'-phosphate
  modified_base 11: mod_base = OTHER; note = 2'-O-methylcytidine-3'-phosphate
  modified_base 12: mod_base = OTHER; note = 2'-O-methyluridine-3'-phosphate
  modified_base 13: mod_base = OTHER; note = 2'-O-methyluridine-3'-phosphate
  modified_base 14: mod_base = OTHER; note = 2'-deoxy-2'-fluorocytidine-3'-phosphate
  modified_base 15: mod_base = OTHER; note = 2'-O-methylcytidine-3'-phosphate
  modified_base 16: mod_base = OTHER; note = 2'-deoxy-2'-fluoroadenosine-3'-phosphate
  modified_base 17: mod_base = OTHER; note = 2'-O-methylguanosine-3'-phosphate
  modified_base 18: mod_base = OTHER; note = 2'-O-methyladenosine-3'-phosphate
  modified_base 19: mod_base = OTHER; note = 2'-O-methyladenosine-3'-phosphate
  modified_base 20: mod_base = OTHER; note = 2'-O-methyladenosine-3'-phosphate
  modified_base 21: mod_base = OTHER; note = 2'-O-methylguanosine-3'-phosphorothioate
  modified_base 22: mod_base = OTHER; note = 2'-O-methylcytidine-3'-phosphorothioate
  modified_base 23: mod_base = OTHER; note = 2'-O-methyluridine
tatgcaatctcttccagaaagct

SEQ ID NO: 536 - RNA, 23 nt, synthetic construct
  source 1..23: mol_type = other RNA
  modified_base 1: mod_base = OTHER; note = 2'-O-methyluridine-3'-phosphorothioate 5'-(E)-Vinylphosphonate
  modified_base 2: mod_base = OTHER; note = 2'-deoxy-2'-fluorouridine-3'-phosphorothioate
  modified_base 3: mod_base = OTHER; note = 2'-O-methyladenosine-3'-phosphate
  modified_base 4: mod_base = OTHER; note = 2'-O-methylcytidine-3'-phosphate
  modified_base 5: mod_base = OTHER; note = 2'-O-methyladenosine-3'-phosphate
  modified_base 6: mod_base = OTHER; note = 2'-deoxy-2'-fluoroadenosine-3'-phosphate
  modified_base 7: mod_base = OTHER; note = 2'-O-methyladenosine-3'-phosphate
  modified_base 8: mod_base = OTHER; note = 2'-deoxy-2'-fluoroguanosine-3'-phosphate
  modified_base 9: mod_base = OTHER; note = 2'-deoxy-2'-fluoroadenosine-3'-phosphate
  modified_base 10: mod_base = OTHER; note = 2'-O-methyluridine-3'-phosphate
  modified_base 11: mod_base = OTHER; note = 2'-O-methylcytidine-3'-phosphate
  modified_base 12: mod_base = OTHER; note = 2'-O-methylcytidine-3'-phosphate
  modified_base 13: mod_base = OTHER; note = 2'-O-methyluridine-3'-phosphate
  modified_base 14: mod_base = OTHER; note = 2'-deoxy-2'-fluorouridine-3'-phosphate
  modified_base 15: mod_base = OTHER; note = 2'-O-methylcytidine-3'-phosphate
  modified_base 16: mod_base = OTHER; note = 2'-deoxy-2'-fluorocytidine-3'-phosphate
  modified_base 17: mod_base = OTHER; note = 2'-O-methyluridine-3'-phosphate
  modified_base 18: mod_base = OTHER; note = 2'-O-methylguanosine-3'-phosphate
  modified_base 19: mod_base = OTHER; note = 2'-O-methyladenosine-3'-phosphate
  modified_base 20: mod_base = OTHER; note = 2'-O-methyladenosine-3'-phosphate
  modified_base 21: mod_base = OTHER; note = 2'-O-methyluridine-3'-phosphorothioate
  modified_base 22: mod_base = OTHER; note = 2'-O-methyluridine-3'-phosphorothioate
  modified_base 23: mod_base = OTHER; note = 2'-O-methyluridine
ttacaaagatccttcctgaattt

SEQ ID NO: 537 - RNA, 23 nt, synthetic construct
  source 1..23: mol_type = other RNA
  modified_base 1: mod_base = OTHER; note = 2'-O-methyluridine-3'-phosphorothioate 5'-(E)-Vinylphosphonate
  modified_base 2: mod_base = OTHER; note = 2'-deoxy-2'-fluoroadenosine-3'-phosphorothioate
  modified_base 3: mod_base = OTHER; note = 2'-O-methyladenosine-3'-phosphate
  modified_base 4: mod_base = OTHER; note = 2'-O-methylcytidine-3'-phosphate
  modified_base 5: mod_base = OTHER; note = 2'-O-methyladenosine-3'-phosphate
  modified_base 6: mod_base = OTHER; note = 2'-deoxy-2'-fluorocytidine-3'-phosphate
  modified_base 7: mod_base = OTHER; note = 2'-O-methyladenosine-3'-phosphate
  modified_base 8: mod_base = OTHER; note = 2'-deoxy-2'-fluoroguanosine-3'-phosphate
  modified_base 9: mod_base = OTHER; note = 2'-deoxy-2'-fluorocytidine-3'-phosphate
  modified_base 10: mod_base = OTHER; note = 2'-O-methyladenosine-3'-phosphate
  modified_base 11: mod_base = OTHER; note = 2'-O-methylguanosine-3'-phosphate
  modified_base 12: mod_base = OTHER; note = 2'-O-methyladenosine-3'-phosphate
  modified_base 13: mod_base = OTHER; note = 2'-O-methylcytidine-3'-phosphate
  modified_base 14: mod_base = OTHER; note = 2'-deoxy-2'-fluorouridine-3'-phosphate
  modified_base 15: mod_base = OTHER; note = 2'-O-methyluridine-3'-phosphate
  modified_base 16: mod_base = OTHER; note = 2'-deoxy-2'-fluorocytidine-3'-phosphate
  modified_base 17: mod_base = OTHER; note = 2'-O-methylcytidine-3'-phosphate
  modified_base 18: mod_base = OTHER; note = 2'-O-methylcytidine-3'-phosphate
  modified_base 19: mod_base = OTHER; note = 2'-O-methyluridine-3'-phosphate
  modified_base 20: mod_base = OTHER; note = 2'-O-methylcytidine-3'-phosphate
  modified_base 21: mod_base = OTHER; note = 2'-O-methyluridine-3'-phosphorothioate
  modified_base 22: mod_base = OTHER; note = 2'-O-methylguanosine-3'-phosphorothioate
  modified_base 23: mod_base = OTHER; note = 2'-O-methylguanosine
taacacagcagacttccctctgg

SEQ ID NO: 538 - RNA, 23 nt, synthetic construct
  source 1..23: mol_type = other RNA
  modified_base 1: mod_base = OTHER; note = 2'-O-methyluridine-3'-phosphorothioate 5'-(E)-Vinylphosphonate
  modified_base 2: mod_base = OTHER; note = 2'-deoxy-2'-fluorouridine-3'-phosphorothioate
  modified_base 3: mod_base = OTHER; note = 2'-O-methylguanosine-3'-phosphate
  modified_base 4: mod_base = OTHER; note = 2'-O-methyladenosine-3'-phosphate
  modified_base 5: mod_base = OTHER; note = 2'-O-methylcytidine-3'-phosphate
  modified_base 6: mod_base = OTHER; note = 2'-deoxy-2'-fluoroadenosine-3'-phosphate
  modified_base 7: mod_base = OTHER; note = 2'-O-methyluridine-3'-phosphate
  modified_base 8: mod_base = OTHER; note = 2'-deoxy-2'-fluorocytidine-3'-phosphate
  modified_base 9: mod_base = OTHER; note = 2'-deoxy-2'-fluorocytidine-3'-phosphate
  modified_base 10: mod_base = OTHER; note = 2'-O-methyluridine-3'-phosphate
  modified_base 11: mod_base = OTHER; note = 2'-O-methyladenosine-3'-phosphate
  modified_base 12: mod_base = OTHER; note = 2'-O-methylcytidine-3'-phosphate
  modified_base 13: mod_base = OTHER; note = 2'-O-methyladenosine-3'-phosphate
  modified_base 14: mod_base = OTHER; note = 2'-deoxy-2'-fluorouridine-3'-phosphate
  modified_base 15: mod_base = OTHER; note = 2'-O-methylguanosine-3'-phosphate
  modified_base 16: mod_base = OTHER; note = 2'-deoxy-2'-fluoroadenosine-3'-phosphate
  modified_base 17: mod_base = OTHER; note = 2'-O-methylguanosine-3'-phosphate
  modified_base 18: mod_base = OTHER; note = 2'-O-methyladenosine-3'-phosphate
  modified_base 19: mod_base = OTHER; note = 2'-O-methyladenosine-3'-phosphate
  modified_base 20: mod_base = OTHER; note = 2'-O-methylcytidine-3'-phosphate
  modified_base 21: mod_base = OTHER; note = 2'-O-methyladenosine-3'-phosphorothioate
  modified_base 22: mod_base = OTHER; note = 2'-O-methylcytidine-3'-phosphorothioate
  modified_base 23: mod_base = OTHER; note = 2'-O-methyladenosine
ttgacatcctacatgagaacaca

SEQ ID NO: 539 - RNA, 23 nt, synthetic construct
  source 1..23: mol_type = other RNA
  modified_base 1: mod_base = OTHER; note = 2'-O-methyluridine-3'-phosphorothioate 5'-(E)-Vinylphosphonate
  modified_base 2: mod_base = OTHER; note = 2'-deoxy-2'-fluoroadenosine-3'-phosphorothioate
  modified_base 3: mod_base = OTHER; note = 2'-O-methylguanosine-3'-phosphate
  modified_base 4: mod_base = OTHER; note = 2'-O-methyladenosine-3'-phosphate
  modified_base 5: mod_base = OTHER; note = 2'-O-methylcytidine-3'-phosphate
  modified_base 6: mod_base = OTHER; note = 2'-deoxy-2'-fluoroadenosine-3'-phosphate
  modified_base 7: mod_base = OTHER; note = 2'-O-methyluridine-3'-phosphate
  modified_base 8: mod_base = OTHER; note = 2'-deoxy-2'-fluorouridine-3'-phosphate
  modified_base 9: mod_base = OTHER; note = 2'-deoxy-2'-fluoroguanosine-3'-phosphate
  modified_base 10: mod_base = OTHER; note = 2'-O-methylguanosine-3'-phosphate
  modified_base 11: mod_base = OTHER; note = 2'-O-methylcytidine-3'-phosphate
  modified_base 12: mod_base = OTHER; note = 2'-O-methylcytidine-3'-phosphate
  modified_base 13: mod_base = OTHER; note = 2'-O-methyladenosine-3'-phosphate
  modified_base 14: mod_base = OTHER; note = 2'-deoxy-2'-fluoroadenosine-3'-phosphate
  modified_base 15: mod_base = OTHER; note = 2'-O-methyladenosine-3'-phosphate
  modified_base 16: mod_base = OTHER; note = 2'-deoxy-2'-fluoroadenosine-3'-phosphate
  modified_base 17: mod_base = OTHER; note = 2'-O-methyladenosine-3'-phosphate
  modified_base 18: mod_base = OTHER; note = 2'-O-methylguanosine-3'-phosphate
  modified_base 19: mod_base = OTHER; note = 2'-O-methyladenosine-3'-phosphate
  modified_base 20: mod_base = OTHER; note = 2'-O-methylguanosine-3'-phosphate
  modified_base 21: mod_base = OTHER; note = 2'-O-methyladenosine-3'-phosphorothioate
  modified_base 22: mod_base = OTHER; note = 2'-O-methyladenosine-3'-phosphorothioate
  modified_base 23: mod_base = OTHER; note = 2'-O-methylguanosine
tagacattggccaaaaagagaag

SEQ ID NO: 540 - RNA, 23 nt, synthetic construct
  source 1..23: mol_type = other RNA
  modified_base 1: mod_base = OTHER; note = 2'-O-methyluridine-3'-phosphorothioate 5'-(E)-Vinylphosphonate
  modified_base 2: mod_base = OTHER; note = 2'-deoxy-2'-fluoroguanosine-3'-phosphorothioate
  modified_base 3: mod_base = OTHER; note = 2'-O-methyluridine-3'-phosphate
  modified_base 4: mod_base = OTHER; note = 2'-O-methylcytidine-3'-phosphate
  modified_base 5: mod_base = OTHER; note = 2'-O-methyladenosine-3'-phosphate
  modified_base 6: mod_base = OTHER; note = 2'-deoxy-2'-fluoroguanosine-3'-phosphate
  modified_base 7: mod_base = OTHER; note = 2'-O-methylguanosine-3'-phosphate
  modified_base 8: mod_base = OTHER; note = 2'-deoxy-2'-fluoroadenosine-3'-phosphate
  modified_base 9: mod_base = OTHER; note = 2'-deoxy-2'-fluoroadenosine-3'-phosphate
  modified_base 10: mod_base = OTHER; note = 2'-O-methyladenosine-3'-phosphate
  modified_base 11: mod_base = OTHER; note = 2'-O-methylguanosine-3'-phosphate
  modified_base 12: mod_base = OTHER; note = 2'-O-methyluridine-3'-phosphate
  modified_base 13: mod_base = OTHER; note = 2'-O-methylguanosine-3'-phosphate
  modified_base 14: mod_base = OTHER; note = 2'-deoxy-2'-fluoroadenosine-3'-phosphate
  modified_base 15: mod_base = OTHER; note = 2'-O-methyladenosine-3'-phosphate
  modified_base 16: mod_base = OTHER; note = 2'-deoxy-2'-fluoroadenosine-3'-phosphate
  modified_base 17: mod_base = OTHER; note = 2'-O-methyladenosine-3'-phosphate
  modified_base 18: mod_base = OTHER; note = 2'-O-methylguanosine-3'-phosphate
  modified_base 19: mod_base = OTHER; note = 2'-O-methyladenosine-3'-phosphate
  modified_base 20: mod_base = OTHER; note = 2'-O-methylcytidine-3'-phosphate
  modified_base 21: mod_base = OTHER; note = 2'-O-methyladenosine-3'-phosphorothioate
  modified_base 22: mod_base = OTHER; note = 2'-O-methyluridine-3'-phosphorothioate
  modified_base 23: mod_base = OTHER; note = 2'-O-methyluridine
tgtcaggaaagtgaaaagacatt

SEQ ID NO: 541 - RNA, 23 nt, synthetic construct
  source 1..23: mol_type = other RNA
  modified_base 1: mod_base = OTHER; note = 2'-O-methyluridine-3'-phosphorothioate 5'-(E)-Vinylphosphonate
  modified_base 2: mod_base = OTHER; note = 2'-deoxy-2'-fluoroguanosine-3'-phosphorothioate
  modified_base 3: mod_base = OTHER; note = 2'-O-methylguanosine-3'-phosphate
  modified_base 4: mod_base = OTHER; note = 2'-O-methyladenosine-3'-phosphate
  modified_base 5: mod_base = OTHER; note = 2'-O-methyluridine-3'-phosphate
  modified_base 6: mod_base = OTHER; note = 2'-deoxy-2'-fluoroguanosine-3'-phosphate
  modified_base 7: mod_base = OTHER; note = 2'-O-methyladenosine-3'-phosphate
  modified_base 8: mod_base = OTHER; note = 2'-deoxy-2'-fluorouridine-3'-phosphate
  modified_base 9: mod_base = OTHER; note = 2'-deoxy-2'-fluorouridine-3'-phosphate
  modified_base 10: mod_base = OTHER; note = 2'-O-methylcytidine-3'-phosphate
  modified_base 11: mod_base = OTHER; note = 2'-O-methyluridine-3'-phosphate
  modified_base 12: mod_base = OTHER; note = 2'-O-methyladenosine-3'-phosphate
  modified_base 13: mod_base = OTHER; note = 2'-O-methyladenosine-3'-phosphate
  modified_base 14: mod_base = OTHER; note = 2'-deoxy-2'-fluoroadenosine-3'-phosphate
  modified_base 15: mod_base = OTHER; note = 2'-O-methylguanosine-3'-phosphate
  modified_base 16: mod_base = OTHER; note = 2'-deoxy-2'-fluoroguanosine-3'-phosphate
  modified_base 17: mod_base = OTHER; note = 2'-O-methylguanosine-3'-phosphate
  modified_base 18: mod_base = OTHER; note = 2'-O-methyluridine-3'-phosphate
  modified_base 19: mod_base = OTHER; note = 2'-O-methylcytidine-3'-phosphate
  modified_base 20: mod_base = OTHER; note = 2'-O-methyladenosine-3'-phosphate
  modified_base 21: mod_base = OTHER; note = 2'-O-methylguanosine-3'-phosphorothioate
  modified_base 22: mod_base = OTHER; note = 2'-O-methylguanosine-3'-phosphorothioate
  modified_base 23: mod_base = OTHER; note = 2'-O-methyladenosine
tggatgattctaaagggtcagga

SEQ ID NO: 542 - RNA, 23 nt, synthetic construct
  source 1..23: mol_type = other RNA
  modified_base 1: mod_base = OTHER; note = 2'-O-methyluridine-3'-phosphorothioate 5'-(E)-Vinylphosphonate
  modified_base 2: mod_base = OTHER; note = 2'-deoxy-2'-fluoroadenosine-3'-phosphorothioate
  modified_base 3: mod_base = OTHER; note = 2'-O-methyladenosine-3'-phosphate
  modified_base 4: mod_base = OTHER; note = 2'-O-methylguanosine-3'-phosphate
  modified_base 5: mod_base = OTHER; note = 2'-O-methylguanosine-3'-phosphate
  modified_base 6: mod_base = OTHER; note = 2'-deoxy-2'-fluorocytidine-3'-phosphate
  modified_base 7: mod_base = OTHER; note = 2'-O-methyladenosine-3'-phosphate
  modified_base 8: mod_base = OTHER; note = 2'-deoxy-2'-fluoroadenosine-3'-phosphate
  modified_base 9: mod_base = OTHER; note = 2'-deoxy-2'-fluorocytidine-3'-phosphate
  modified_base 10: mod_base = OTHER; note = 2'-O-methyluridine-3'-phosphate
  modified_base 11: mod_base = OTHER; note = 2'-O-methyluridine-3'-phosphate
  modified_base 12: mod_base = OTHER; note = 2'-O-methylcytidine-3'-phosphate
  modified_base 13: mod_base = OTHER; note = 2'-O-methylcytidine-3'-phosphate
  modified_base 14: mod_base = OTHER; note = 2'-deoxy-2'-fluoroadenosine-3'-phosphate
  modified_base 15: mod_base = OTHER; note = 2'-O-methyluridine-3'-phosphate
  modified_base 16: mod_base = OTHER; note = 2'-deoxy-2'-fluoroguanosine-3'-phosphate
  modified_base 17: mod_base = OTHER; note = 2'-O-methyladenosine-3'-phosphate
  modified_base 18: mod_base = OTHER; note = 2'-O-methyluridine-3'-phosphate
  modified_base 19: mod_base = OTHER; note = 2'-O-methyluridine-3'-phosphate
  modified_base 20: mod_base = OTHER; note = 2'-O-methylguanosine-3'-phosphate
  modified_base 21: mod_base = OTHER; note = 2'-O-methylcytidine-3'-phosphorothioate
  modified_base 22: mod_base = OTHER; note = 2'-O-methylguanosine-3'-phosphorothioate
  modified_base 23: mod_base = OTHER; note = 2'-O-methyluridine
taaggcaacttccatgattgcgt

SEQ ID NO: 543 - RNA, 23 nt, synthetic construct
  source 1..23: mol_type = other RNA
  modified_base 1: mod_base = OTHER; note = 2'-O-methyluridine-3'-phosphorothioate 5'-(E)-Vinylphosphonate
  modified_base 2: mod_base = OTHER; note = 2'-deoxy-2'-fluorouridine-3'-phosphorothioate
  modified_base 3: mod_base = OTHER; note = 2'-O-methyluridine-3'-phosphate
  modified_base 4: mod_base = OTHER; note = 2'-O-methylcytidine-3'-phosphate
  modified_base 5: mod_base = OTHER; note = 2'-O-methyluridine-3'-phosphate
  modified_base 6: mod_base = OTHER; note = 2'-deoxy-2'-fluorouridine-3'-phosphate
  modified_base 7: mod_base = OTHER; note = 2'-O-methyladenosine-3'-phosphate
  modified_base 8: mod_base = OTHER; note = 2'-deoxy-2'-fluoroadenosine-3'-phosphate
  modified_base 9: mod_base = OTHER; note = 2'-deoxy-2'-fluorocytidine-3'-phosphate
  modified_base 10: mod_base = OTHER; note = 2'-O-methylcytidine-3'-phosphate
  modified_base 11: mod_base = OTHER; note = 2'-O-methyladenosine-3'-phosphate
  modified_base 12: mod_base = OTHER; note = 2'-O-methylguanosine-3'-phosphate
  modified_base 13: mod_base = OTHER; note = 2'-O-methyluridine-3'-phosphate
  modified_base 14: mod_base = OTHER; note = 2'-deoxy-2'-fluoroguanosine-3'-phosphate
  modified_base 15: mod_base = OTHER; note = 2'-O-methyladenosine-3'-phosphate
  modified_base 16: mod_base = OTHER; note = 2'-deoxy-2'-fluorocytidine-3'-phosphate
  modified_base 17: mod_base = OTHER; note = 2'-O-methyladenosine-3'-phosphate
  modified_base 18: mod_base = OTHER; note = 2'-O-methyladenosine-3'-phosphate
  modified_base 19: mod_base = OTHER; note = 2'-O-methyluridine-3'-phosphate
  modified_base 20: mod_base = OTHER; note = 2'-O-methyladenosine-3'-phosphate
  modified_base 21: mod_base = OTHER; note = 2'-O-methyladenosine-3'-phosphorothioate
  modified_base 22: mod_base = OTHER; note = 2'-O-methylguanosine-3'-phosphorothioate
  modified_base 23: mod_base = OTHER; note = 2'-O-methylguanosine
tttcttaaccagtgacaataagg

SEQ ID NO: 544 - RNA, 23 nt, synthetic construct
  source 1..23: mol_type = other RNA
  modified_base 1: mod_base = OTHER; note = 2'-O-methyluridine-3'-phosphorothioate 5'-(E)-Vinylphosphonate
  modified_base 2: mod_base = OTHER; note = 2'-deoxy-2'-fluorouridine-3'-phosphorothioate
  modified_base 3: mod_base = OTHER; note = 2'-O-methyluridine-3'-phosphate
  modified_base 4: mod_base = OTHER; note = 2'-O-methylcytidine-3'-phosphate
  modified_base 5: mod_base = OTHER; note = 2'-O-methyladenosine-3'-phosphate
  modified_base 6: mod_base = OTHER; note = 2'-deoxy-2'-fluoroadenosine-3'-phosphate
  modified_base 7: mod_base = OTHER; note = 2'-O-methyluridine-3'-phosphate
  modified_base 8: mod_base = OTHER; note = 2'-deoxy-2'-fluorocytidine-3'-phosphate
  modified_base 9: mod_base = OTHER; note = 2'-deoxy-2'-fluorouridine-3'-phosphate
  modified_base 10: mod_base = OTHER; note = 2'-O-methylcytidine-3'-phosphate
  modified_base 11: mod_base = OTHER; note = 2'-O-methylguanosine-3'-phosphate
  modified_base 12: mod_base = OTHER; note = 2'-O-methylcytidine-3'-phosphate
  modified_base 13: mod_base = OTHER; note = 2'-O-methylcytidine-3'-phosphate
  modified_base 14: mod_base = OTHER; note = 2'-deoxy-2'-fluoroadenosine-3'-phosphate
  modified_base 15: mod_base = OTHER; note = 2'-O-methyladenosine-3'-phosphate
  modified_base 16: mod_base = OTHER; note = 2'-deoxy-2'-fluoroguanosine-3'-phosphate
  modified_base 17: mod_base = OTHER; note = 2'-O-methyluridine-3'-phosphate
  modified_base 18: mod_base = OTHER; note = 2'-O-methyluridine-3'-phosphate
  modified_base 19: mod_base = OTHER; note = 2'-O-methylcytidine-3'-phosphate
  modified_base 20: mod_base = OTHER; note = 2'-O-methyluridine-3'-phosphate
  modified_base 21: mod_base = OTHER; note = 2'-O-methyluridine-3'-phosphorothioate
  modified_base 22: mod_base = OTHER; note = 2'-O-methyladenosine-3'-phosphorothioate
  modified_base 23: mod_base = OTHER; note = 2'-O-methyladenosine
tttcaatctcgccaagttcttaa

SEQ ID NO: 545 - RNA, 23 nt, synthetic construct
  source 1..23: mol_type = other RNA
  modified_base 1: mod_base = OTHER; note = 2'-O-methyluridine-3'-phosphorothioate 5'-(E)-Vinylphosphonate
  modified_base 2: mod_base = OTHER; note = 2'-deoxy-2'-fluorocytidine-3'-phosphorothioate
  modified_base 3: mod_base = OTHER; note = 2'-O-methyladenosine-3'-phosphate
  modified_base 4: mod_base = OTHER; note = 2'-O-methyladenosine-3'-phosphate
  modified_base 5: mod_base = OTHER; note = 2'-O-methylcytidine-3'-phosphate
  modified_base 6: mod_base = OTHER; note = 2'-deoxy-2'-fluoroadenosine-3'-phosphate
  modified_base 7: mod_base = OTHER; note = 2'-O-methyladenosine-3'-phosphate
  modified_base 8: mod_base = OTHER; note = 2'-deoxy-2'-fluorouridine-3'-phosphate
  modified_base 9: mod_base = OTHER; note = 2'-deoxy-2'-fluoroadenosine-3'-phosphate
  modified_base 10: mod_base = OTHER; note = 2'-O-methyladenosine-3'-phosphate
  modified_base 11: mod_base = OTHER; note = 2'-O-methylcytidine-3'-phosphate
  modified_base 12: mod_base = OTHER; note = 2'-O-methyladenosine-3'-phosphate
  modified_base 13: mod_base = OTHER; note = 2'-O-methyladenosine-3'-phosphate
  modified_base 14: mod_base = OTHER; note = 2'-deoxy-2'-fluoroadenosine-3'-phosphate
  modified_base 15: mod_base = OTHER; note = 2'-O-methyladenosine-3'-phosphate
  modified_base 16: mod_base = OTHER; note = 2'-deoxy-2'-fluoroguanosine-3'-phosphate
  modified_base 17: mod_base = OTHER; note = 2'-O-methylcytidine-3'-phosphate
  modified_base 18: mod_base = OTHER; note = 2'-O-methylcytidine-3'-phosphate
  modified_base 19: mod_base = OTHER; note = 2'-O-methylcytidine-3'-phosphate
  modified_base 20: mod_base = OTHER; note = 2'-O-methyluridine-3'-phosphate
  modified_base 21: mod_base = OTHER; note = 2'-O-methyluridine-3'-phosphorothioate
  modified_base 22: mod_base = OTHER; note = 2'-O-methylcytidine-3'-phosphorothioate
  modified_base 23: mod_base = OTHER; note = 2'-O-methyladenosine
tcaacaataacaaaagcccttca

SEQ ID NO: 546 - RNA, 23 nt, synthetic construct
  source 1..23: mol_type = other RNA
  modified_base 1: mod_base = OTHER; note = 2'-O-methyluridine-3'-phosphorothioate 5'-(E)-Vinylphosphonate
  modified_base 2: mod_base = OTHER; note = 2'-deoxy-2'-fluoroguanosine-3'-phosphorothioate
  modified_base 3: mod_base = OTHER; note = 2'-O-methyladenosine-3'-phosphate
  modified_base 4: mod_base = OTHER; note = 2'-O-methyladenosine-3'-phosphate
  modified_base 5: mod_base = OTHER; note = 2'-O-methyladenosine-3'-phosphate
  modified_base 6: mod_base = OTHER; note = 2'-deoxy-2'-fluorocytidine-3'-phosphate
  modified_base 7: mod_base = OTHER; note = 2'-O-methyladenosine-3'-phosphate
  modified_base 8: mod_base = OTHER; note = 2'-deoxy-2'-fluoroadenosine-3'-phosphate
  modified_base 9: mod_base = OTHER; note = 2'-deoxy-2'-fluoroadenosine-3'-phosphate
  modified_base 10: mod_base = OTHER; note = 2'-O-methyladenosine-3'-phosphate
  modified_base 11: mod_base = OTHER; note = 2'-O-methyladenosine-3'-phosphate
  modified_base 12: mod_base = OTHER; note = 2'-O-methyluridine-3'-phosphate
  modified_base 13: mod_base = OTHER; note = 2'-O-methyladenosine-3'-phosphate
  modified_base 14: mod_base = OTHER; note = 2'-deoxy-2'-fluorouridine-3'-phosphate
  modified_base 15: mod_base = OTHER; note = 2'-O-methylcytidine-3'-phosphate
  modified_base 16: mod_base = OTHER; note = 2'-deoxy-2'-fluorocytidine-3'-phosphate
  modified_base 17: mod_base = OTHER; note = 2'-O-methyladenosine-3'-phosphate
  modified_base 18: mod_base = OTHER; note = 2'-O-methyladenosine-3'-phosphate
  modified_base 19: mod_base = OTHER; note = 2'-O-methylcytidine-3'-phosphate
  modified_base 20: mod_base = OTHER; note = 2'-O-methyladenosine-3'-phosphate
  modified_base 21: mod_base = OTHER; note = 2'-O-methyladenosine-3'-phosphorothioate
  modified_base 22: mod_base = OTHER; note = 2'-O-methylcytidine-3'-phosphorothioate
  modified_base 23: mod_base = OTHER; note = 2'-O-methyladenosine
tgaaacaaaaatatccaacaaca

SEQ ID NO: 547 - RNA, 23 nt, synthetic construct
  source 1..23: mol_type = other RNA
  modified_base 1: mod_base = OTHER; note = 2'-O-methyluridine-3'-phosphorothioate 5'-(E)-Vinylphosphonate
  modified_base 2: mod_base = OTHER; note = 2'-deoxy-2'-fluoroadenosine-3'-phosphorothioate
  modified_base 3: mod_base = OTHER; note = 2'-O-methyluridine-3'-phosphate
  modified_base 4: mod_base = OTHER; note = 2'-O-methylguanosine-3'-phosphate
  modified_base 5: mod_base = OTHER; note = 2'-O-methyladenosine-3'-phosphate
  modified_base 6: mod_base = OTHER; note = 2'-deoxy-2'-fluorouridine-3'-phosphate
  modified_base 7: mod_base = OTHER; note = 2'-O-methylguanosine-3'-phosphate
  modified_base 8: mod_base = OTHER; note = 2'-deoxy-2'-fluorouridine-3'-phosphate
  modified_base 9: mod_base = OTHER; note = 2'-deoxy-2'-fluoroguanosine-3'-phosphate
  modified_base 10: mod_base = OTHER; note = 2'-O-methylcytidine-3'-phosphate
  modified_base 11: mod_base = OTHER; note = 2'-O-methyluridine-3'-phosphate
  modified_base 12: mod_base = OTHER; note = 2'-O-methyluridine-3'-phosphate
  modified_base 13: mod_base = OTHER; note = 2'-O-methyluridine-3'-phosphate
  modified_base 14: mod_base = OTHER; note = 2'-deoxy-2'-fluorouridine-3'-phosphate
  modified_base 15: mod_base = OTHER; note = 2'-O-methyladenosine-3'-phosphate
  modified_base 16: mod_base = OTHER; note = 2'-deoxy-2'-fluorouridine-3'-phosphate
  modified_base 17: mod_base = OTHER; note = 2'-O-methylguanosine-3'-phosphate
  modified_base 18: mod_base = OTHER; note = 2'-O-methylguanosine-3'-phosphate
  modified_base 19: mod_base = OTHER; note = 2'-O-methylguanosine-3'-phosphate
  modified_base 20: mod_base = OTHER; note = 2'-O-methyladenosine-3'-phosphate
  modified_base 21: mod_base = OTHER; note = 2'-O-methyladenosine-3'-phosphorothioate
  modified_base 22: mod_base = OTHER; note = 2'-O-methyladenosine-3'-phosphorothioate
  modified_base 23: mod_base = OTHER; note = 2'-O-methylcytidine
tatgatgtgcttttatgggaaac

SEQ ID NO: 548 - RNA, 23 nt, synthetic construct
  source 1..23: mol_type = other RNA
gcccgggattccaatctgaggag

SEQ ID NO: 549 - RNA, 23 nt, synthetic construct
  source 1..23: mol_type = other RNA
gcctccttctccttgctctcacc

SEQ ID NO: 550 - RNA, 23 nt, synthetic construct
  source 1..23: mol_type = other RNA
agcacctgaggatacagagctgg

SEQ ID NO: 551 - RNA, 23 nt, synthetic construct
  source 1..23: mol_type = other RNA
cccaggtgatgagtgaggttcga

SEQ ID NO: 552 - RNA, 23 nt, synthetic construct
  source 1..23: mol_type = other RNA
gttcgaagaacggaagatttaaa

SEQ ID NO: 553 - RNA, 23 nt, synthetic construct
  source 1..23: mol_type = other RNA
ggcctccgtattgaatgaaagac

SEQ ID NO: 554 - RNA, 23 nt, synthetic construct
  source 1..23: mol_type = other RNA
agtgcaaagacatcaccatgaac

SEQ ID NO: 555 - RNA, 23 nt, synthetic construct
  source 1..23: mol_type = other RNA
ccatgaacactagcattccttat

SEQ ID NO: 556 - RNA, 23 nt, synthetic construct
  source 1..23: mol_type = other RNA
ttccttatcagcagaatccttac

SEQ ID NO: 557 - RNA, 23 nt, synthetic construct
  source 1..23: mol_type = other RNA
gcagctccaatgtcatccagtgc

SEQ ID NO: 558 - RNA, 23 nt, synthetic construct
  source 1..23: mol_type = other RNA
aacaaccacttccacatcagatg

SEQ ID NO: 559 - RNA, 23 nt, synthetic construct
  source 1..23: mol_type = other RNA
agatgcttcacctgtcaagtatg

SEQ ID NO: 560 - RNA, 23 nt, synthetic construct
  source 1..23: mol_type = other RNA
tcaggcttcttcttcaagaacca

SEQ ID NO: 561 - RNA, 23 nt, synthetic construct
  source 1..23: mol_type = other RNA
agaaccaggagtacatctgcacc

SEQ ID NO: 562 - RNA, 23 nt, synthetic construct
  source 1..23: mol_type = other RNA
aggactaccagcaactctatggc

SEQ ID NO: 563 - RNA, 23 nt, synthetic construct
  source 1..23: mol_type = other RNA
ccgggacttcatcacaggcgaag

SEQ ID NO: 564 - RNA, 23 nt, synthetic construct
  source 1..23: mol_type = other RNA
cccaagtgcttcgtgtgcagctt

SEQ ID NO: 565 - RNA, 23 nt, synthetic construct
  source 1..23: mol_type = other RNA
agcttgtgcaggaagcctttccc

SEQ ID NO: 566 - RNA, 23 nt, synthetic construct
  source 1..23: mol_type = other RNA
cccattggagacaaggtgacctt

SEQ ID NO: 567 - RNA, 23 nt, synthetic construct
  source 1..23: mol_type = other RNA
gtgaccttcagcggtaaagaatg

SEQ ID NO: 568 - RNA, 23 nt, synthetic construct
  source 1..23: mol_type = other RNA
aaagaatgtgtgtgccaaacgtg

SEQ ID NO: 569 - RNA, 23 nt, synthetic construct
  source 1..23: mol_type = other RNA
gccagcagtaagcccatcaagat

SEQ ID NO: 570 - RNA, 23 nt, synthetic construct
  source 1..23: mol_type = other RNA
agctgcttcaagtgccagacctg

SEQ ID NO: 571 - RNA, 23 nt, synthetic construct
  source 1..23: mol_type = other RNA
aggatggtgttccatactgtgag

SEQ ID NO: 572 - RNA, 23 nt, synthetic construct
  source 1..23: mol_type = other RNA
tttggcattaaatgtgagacttg

SEQ ID NO: 573 - RNA, 23 nt, synthetic construct
  source 1..23: mol_type = other RNA
acttgtgaccgatacatcagtgg

SEQ ID NO: 574 - RNA, 23 nt, synthetic construct
  source 1..23: mol_type = other RNA
tgccaccagatgttcaccgaagg

SEQ ID NO: 575 - RNA, 23 nt, synthetic construct
  source 1..23: mol_type = other RNA
aggagaggaaatgtacctcacag

SEQ ID NO: 576 - RNA, 23 nt, synthetic construct
  source 1..23: mol_type = other RNA
cctcacaggttccgaggtttggc

SEQ ID NO: 577 - RNA, 23 nt, synthetic construct
  source 1..23: mol_type = other RNA
gttaaagcatagacggacatctg

SEQ ID NO: 578 - RNA, 23 nt, synthetic construct
  source 1..23: mol_type = other RNA
gacatctgaaacctccatctcac

SEQ ID NO: 579 - RNA, 23 nt, synthetic construct
  source 1..23: mol_type = other RNA
accgagtcatctgcgctaaagtg

SEQ ID NO: 580 - RNA, 23 nt, synthetic construct
  source 1..23: mol_type = other RNA
atgagatccttaattacaaagac

SEQ ID NO: 581 - RNA, 23 nt, synthetic construct
  source 1..23: mol_type = other RNA
aagtctatctacgaggtacaacg

SEQ ID NO: 582 - RNA, 23 nt, synthetic construct
  source 1..23: mol_type = other RNA
tcatttcctatgagcctcattcc

SEQ ID NO: 583 - RNA, 23 nt, synthetic construct
  source 1..23: mol_type = other RNA
ctcattccagatacatgtccgac

SEQ ID NO: 584 - RNA, 23 nt, synthetic construct
  source 1..23: mol_type = other RNA
tgtccgacgagatgctggagaga

SEQ ID NO: 585 - RNA, 23 nt, synthetic construct
  source 1..23: mol_type = other RNA
agagtcgctgggaacattatctc

SEQ ID NO: 586 - RNA, 23 nt, synthetic construct
  source 1..23: mol_type = other RNA
cccaggacatctacgagaacctg

SEQ ID NO: 587 - RNA, 23 nt, synthetic construct
  source 1..23: mol_type = other RNA
cctcaccactactaccgctctgg

SEQ ID NO: 588 - RNA, 23 nt, synthetic construct
  source 1..23: mol_type = other RNA
tccataccatagccagttagatg

SEQ ID NO: 589 - RNA, 23 nt, synthetic construct
  source 1..23: mol_type = other RNA
ctccactccaacctcttaccagg

SEQ ID NO: 590 - RNA, 23 nt, synthetic construct
  source 1..23: mol_type = other RNA
ggctcccaagcactttcacatcc

SEQ ID NO: 591 - RNA, 23 nt, synthetic construct
  source 1..23: mol_type = other RNA
gagacagtaacatctaccggaaa

SEQ ID NO: 592 - RNA, 23 nt, synthetic construct
  source 1..23: mol_type = other RNA
catggtgatttgtctacagcaac

SEQ ID NO: 593 - RNA, 23 nt, synthetic construct
  source 1..23: mol_type = other RNA
aaacaagtgaagacatcagccag

SEQ ID NO: 594 - RNA, 23 nt, synthetic construct
  source 1..23: mol_type = other RNA
agacctccaagtacagtcccatc

SEQ ID NO: 595 - RNA, 23 nt, synthetic construct
  source 1..23: mol_type = other RNA
cttcggagtctgagtactggacc

SEQ ID NO: 596 - RNA, 23 nt, synthetic construct
  source 1..23: mol_type = other RNA
cgagccagaaggttctcgtctgg

SEQ ID NO: 597 - RNA, 23 nt, synthetic construct
  source 1..23: mol_type = other RNA
gagaggaggatgattttgaccgc

SEQ ID NO: 598 - RNA, 23 nt, synthetic construct
  source 1..23: mol_type = other RNA
gcacaagctccaaagtggaattg

SEQ ID NO: 599 - RNA, 23 nt, synthetic construct
  source 1..23: mol_type = other RNA
gccggctgattctgaaggaagaa

SEQ ID NO: 600 - RNA, 23 nt, synthetic construct
  source 1..23: mol_type = other RNA
cgagctcctatgcagatccctgg

SEQ ID NO: 601 - RNA, 23 nt, synthetic construct
  source 1..23: mol_type = other RNA
gctggctatgagatgtccctcaa

SEQ ID NO: 602 - RNA, 23 nt, synthetic construct
  source 1..23: mol_type = other RNA
gatcctctcatctccaaatctgc

SEQ ID NO: 603 - RNA, 23 nt, synthetic construct
  source 1..23: mol_type = other RNA
ctgcctaccgaagaaatgggctg

SEQ ID NO: 604 - RNA, 23 nt, synthetic construct
  source 1..23: mol_type = other RNA
acctcttccactacgacagcatg

SEQ ID NO: 605 - RNA, 23 nt, synthetic construct
  source 1..23: mol_type = other RNA
acagcatgaacgcagtcaactgg

SEQ ID NO: 606 - RNA, 23 nt, synthetic construct
  source 1..23: mol_type = other RNA
gtacaagatctacccttatgaac

SEQ ID NO: 607 - RNA, 23 nt, synthetic construct
  source 1..23: mol_type = other RNA
gctggtgactacaagaggaagaa

SEQ ID NO: 608 - RNA, 23 nt, synthetic construct
  source 1..23: mol_type = other RNA
ctgcccaaggatgtagacaggac

SEQ ID NO: 609 - RNA, 23 nt, synthetic construct
  source 1..23: mol_type = other RNA
agttctaccaagtctttggcatg

SEQ ID NO: 610 - RNA, 23 nt, synthetic construct
  source 1..23: mol_type = other RNA
gcatgaccatctctgagtttgac

SEQ ID NO: 611 - RNA, 23 nt, synthetic construct
  source 1..23: mol_type = other RNA
ggaatgaactgaagaagcaagcc

SEQ ID NO: 612 - RNA, 23 nt, synthetic construct
  source 1..23: mol_type = other RNA
agaggctctataaatatatatgc

SEQ ID NO: 613 - RNA, 23 nt, synthetic construct
  source 1..23: mol_type = other RNA
atatgtaaaatctctctactgaa

SEQ ID NO: 614 - RNA, 23 nt, synthetic construct
  source 1..23: mol_type = other RNA
ctcggtataatcctctcttgtgt

SEQ ID NO: 615 - RNA, 23 nt, synthetic construct
  source 1..23: mol_type = other RNA
cctgccatgagacttgcttttct

SEQ ID NO: 616 - RNA, 23 nt, synthetic construct
  source 1..23: mol_type = other RNA
gcttttctgtactgtcaggcaag

SEQ ID NO: 617 - RNA, 23 nt, synthetic construct
  source 1..23: mol_type = other RNA
acgtcatcgagatatttttatgc

SEQ ID NO: 618 - RNA, 23 nt, synthetic construct
  source 1..23: mol_type = other RNA
ccttactttctcttttctaagtg

SEQ ID NO: 619 - RNA, 23 nt, synthetic construct
  source 1..23: mol_type = other RNA
tactgaaacatctgtcctaactt

SEQ ID NO: 620 - RNA, 23 nt, synthetic construct
  source 1..23: mol_type = other RNA
tccaactctctttcctaaagaag

SEQ ID NO: 621 - RNA, 23 nt, synthetic construct
  source 1..23: mol_type = other RNA
cctgaagaagtctctcttctctc

SEQ ID NO: 622 - RNA, 23 nt, synthetic construct
  source 1..23: mol_type = other RNA
cctttcttaaatttctagggctg

SEQ ID NO: 623 - RNA, 23 nt, synthetic construct
  source 1..23: mol_type = other RNA
tgctgaccatgtggtttccacac

SEQ ID NO: 624 - RNA, 23 nt, synthetic construct
  source 1..23: mol_type = other RNA
ccctcccatgggaagatctgcag

SEQ ID NO: 625 - RNA, 23 nt, synthetic construct
  source 1..23: mol_type = other RNA
ccaaatcagtgagcacctttgag

SEQ ID NO: 626 - RNA, 23 nt, synthetic construct
  source 1..23: mol_type = other RNA
gcccacgaagaactttctcaaca

SEQ ID NO: 627 - RNA, 23 nt, synthetic construct
  source 1..23: mol_type = other RNA
gggcaatgcagttaaaagggtga

SEQ ID NO: 628 - RNA, 23 nt, synthetic construct
  source 1..23: mol_type = other RNA
gagcctcaaatctagtcattaca

SEQ ID NO: 629 - RNA, 23 nt, synthetic construct
  source 1..23: mol_type = other RNA
cattacaccagtcaacagaagtg

SEQ ID NO: 630 - RNA, 23 nt, synthetic construct
  source 1..23: mol_type = other RNA
ctctcctcagctccttaaccctc

SEQ ID NO: 631 - RNA, 23 nt, synthetic construct
  source 1..23: mol_type = other RNA
cctggattgtaacctctcccttg

SEQ ID NO: 632 - RNA, 23 nt, synthetic construct
  source 1..23: mol_type = other RNA
cccttgtccaaatctaggattcc

SEQ ID NO: 633 - RNA, 23 nt, synthetic construct
  source 1..23: mol_type = other RNA
attcctggtaggaaaaggaaaag

SEQ ID NO: 634 - RNA, 23 nt, synthetic construct
  source 1..23: mol_type = other RNA
cttccctccaccacttccaactg

SEQ ID NO: 635 - RNA, 23 nt, synthetic construct
  source 1..23: mol_type = other RNA
acctggacttggagaaccagagg

SEQ ID NO: 636 - RNA, 23 nt, synthetic construct
  source 1..23: mol_type = other RNA
ggcacctgttagaatcagagctg

SEQ ID NO: 637 - RNA, 23 nt, synthetic construct
  source 1..23: mol_type = other RNA
gagctgcaggatttcttgggacc

SEQ ID NO: 638 - RNA, 23 nt, synthetic construct
  source 1..23: mol_type = other RNA
ccttccctctttcaaggagaagc

SEQ ID NO: 639 - RNA, 23 nt, synthetic construct
  source 1..23: mol_type = other RNA
catgattgcagcttgtattcttt

SEQ ID NO: 640 - RNA, 23 nt, synthetic construct
  source 1..23: mol_type = other RNA
tctttagccttattacaatctat

SEQ ID NO: 641 - RNA, 23 nt, synthetic construct
  source 1..23: mol_type = other RNA
atctatgtgcctgacaactcaac

SEQ ID NO: 642 - RNA, 23 nt, synthetic construct
  source 1..23: mol_type = other RNA
agctccaactgaacaaccagaca

SEQ ID NO: 643 - RNA, 23 nt, synthetic construct
  source 1..23: mol_type = other RNA
gacagacaactctcatcatcctc

SEQ ID NO: 644 - RNA, 23 nt, synthetic construct
  source 1..23: mol_type = other RNA
tcatcctccagagagaaaatagg

SEQ ID NO: 645 - RNA, 23 nt, synthetic construct
  source 1..23: mol_type = other RNA
aaaataggccgtgtctcaaagaa

SEQ ID NO: 646 - RNA, 23 nt, synthetic construct
  source 1..23: mol_type = other RNA
tcaaagaaaggttcttggtctat

SEQ ID NO: 647 - RNA, 23 nt, synthetic construct
  source 1..23: mol_type = other RNA
cctgctgcaaagttggccatgtt

SEQ ID NO: 648 - RNA, 23 nt, synthetic construct
  source 1..23: mol_type = other RNA
ccatgtttcacagggaaactttt

SEQ ID NO: 649 - RNA, 23 nt, synthetic construct
  source 1..23: mol_type = other RNA
ggctgcttatgagattccaaaat

SEQ ID NO: 650 - RNA, 23 nt, synthetic construct
  source 1..23: mol_type = other RNA
tccaaaatgaagtgttggccaac

SEQ ID NO: 651 - RNA, 23 nt, synthetic construct
  source 1..23: mol_type = other RNA
ggccatcctggattttcccagtg

SEQ ID NO: 652 - RNA, 23 nt, synthetic construct
  source 1..23: mol_type = other RNA
cagtggcttcccttcctgctcgc

SEQ ID NO: 653 - RNA, 23 nt, synthetic construct
  source 1..23: mol_type = other RNA
agaaagcttaacctctcttctcc

SEQ ID NO: 654 - RNA, 23 nt, synthetic construct
  source 1..23: mol_type = other RNA
ctccaaacctttcaccttgaatg

SEQ ID NO: 655 - RNA, 23 nt, synthetic construct
  source 1..23: mol_type = other RNA
cttgaatgggtaatgtttggtgg

SEQ ID NO: 656 - RNA, 23 nt, synthetic construct
  source 1..23: mol_type = other RNA
gctgttccttcttggagaagcct

SEQ ID NO: 657 - RNA, 23 nt, synthetic construct
  source 1..23: mol_type = other RNA
aagccttgagtcggaccattttg

SEQ ID NO: 658 - RNA, 23 nt, synthetic construct
  source 1..23: mol_type = other RNA
ggaaggatgaagaagtgaaaatg

SEQ ID NO: 659 - RNA, 23 nt, synthetic construct
  source 1..23: mol_type = other RNA
aaatgacaataatgactctcaag

SEQ ID NO: 660 - RNA, 23 nt, synthetic construct
  source 1..23: mol_type = other RNA
tgacatggcaaatgtagaactga

SEQ ID NO: 661 - RNA, 23 nt, synthetic construct
  source 1..23: mol_type = other RNA
aactgacttaaattgaacaaacc

SEQ ID NO: 662 - RNA, 23 nt, synthetic construct
  source 1..23: mol_type = other RNA
gcacctctgatgttgagcacctg

SEQ ID NO: 663 - RNA, 23 nt, synthetic construct
  source 1..23: mol_type = other RNA
gctgaatactgagcactgaatgg

SEQ ID NO: 664 - RNA, 23 nt, synthetic construct
  source 1..23: mol_type = other RNA
ctcagggatatgcctaccaatag

SEQ ID NO: 665 - RNA, 23 nt, synthetic construct
  source 1..23: mol_type = other RNA
taaggcatgtacccaaacataac

SEQ ID NO: 666 - RNA, 23 nt, synthetic construct
  source 1..23: mol_type = other RNA
taacggatgtaaggcagaaagtg

SEQ ID NO: 667 - RNA, 23 nt, synthetic construct
  source 1..23: mol_type = other RNA
tgatcggagaaggaatgagaaag

SEQ ID NO: 668 - RNA, 23 nt, synthetic construct
  source 1..23: mol_type = other RNA
gcgtgatgttaatgaaaagtcat

SEQ ID NO: 669 - RNA, 23 nt, synthetic construct
  source 1..23: mol_type = other RNA
aaagtcatatgcagctagagcag

SEQ ID NO: 670 - RNA, 23 nt, synthetic construct
  source 1..23: mol_type = other RNA
agctttctggaagagattgcatc

SEQ ID NO: 671 - RNA, 23 nt, synthetic construct
  source 1..23: mol_type = other RNA
aaattcaggaaggatctttgtag

SEQ ID NO: 672 - RNA, 23 nt, synthetic construct
  source 1..23: mol_type = other RNA
ccagagggaagtctgctgtgttc

SEQ ID NO: 673 - RNA, 23 nt, synthetic construct
  source 1..23: mol_type = other RNA
tgtgttctcatgtaggatgtcag

SEQ ID NO: 674 - RNA, 23 nt, synthetic construct
  source 1..23: mol_type = other RNA
cttctctttttggccaatgtctt

SEQ ID NO: 675 - RNA, 23 nt, synthetic construct
  source 1..23: mol_type = other RNA
aatgtcttttcactttcctgacc

SEQ ID NO: 676 - RNA, 23 nt, synthetic construct
  source 1..23: mol_type = other RNA
tcctgaccctttagaatcatccc

SEQ ID NO: 677 - RNA, 23 nt, synthetic construct
  source 1..23: mol_type = other RNA
acgcaatcatggaagttgcctta

SEQ ID NO: 678 - RNA, 23 nt, synthetic construct
  source 1..23: mol_type = other RNA
ccttattgtcactggttaagaac

SEQ ID NO: 679 - RNA, 23 nt, synthetic construct
  source 1..23: mol_type = other RNA
ttaagaacttggcgagattgaag

SEQ ID NO: 680 - RNA, 23 nt, synthetic construct
  source 1..23: mol_type = other RNA
tgaagggcttttgttattgttgt

SEQ ID NO: 681 - RNA, 23 nt, synthetic construct
  source 1..23: mol_type = other RNA
tgttgttggatatttttgtttcc

SEQ ID NO: 682 - RNA, 23 nt, synthetic construct
  source 1..23: mol_type = other RNA
gtttcccataaaagcacatcatt

SEQ ID NO: 683 - RNA, 40 nt, Homo sapiens
  source 1..40: mol_type = other RNA
cctggattgtaacctctcccttgtccaaatctaggattcc

SEQ ID NO: 684 - RNA, 38 nt, Homo sapiens
  source 1..38: mol_type = other RNA
tcatcctccagagagaaaataggccgtgtctcaaagaa

SEQ ID NO: 685 - RNA, 39 nt, Homo sapiens
  source 1..39: mol_type = other RNA
ccagagggaagtctgctgtgttctcatgtaggatgtcag

SEQ ID NO: 686 - RNA, 38 nt, Homo sapiens
  source 1..38: mol_type = other RNA
gtgaccttcagcggtaaagaatgtgtgtgccaaacgtg

SEQ ID NO: 687 - RNA, 58 nt, Homo sapiens
  source 1..58: mol_type = other RNA
tgccaccagatgttcaccgaaggagaggaaatgtacctcacaggttccgaggtttggc

SEQ ID NO: 688 - RNA, 38 nt, Homo sapiens
  source 1..38: mol_type = other RNA
tcatttcctatgagcctcattccagatacatgtccgac

SEQ ID NO: 689 - RNA, 46 nt, Homo sapiens
  source 1..46: mol_type = other RNA
gcacaagctccaaagtggaattggccggctgattctgaaggaagaa

SEQ ID NO: 690 - RNA, 38 nt, Homo sapiens
  source 1..38: mol_type = other RNA
acctcttccactacgacagcatgaacgcagtcaactgg

SEQ ID NO: 691 - RNA, 41 nt, Homo sapiens
  source 1..41: mol_type = other RNA
aacaaccacttccacatcagatgcttcacctgtcaagtatg

SEQ ID NO: 692 - RNA, 43 nt, Homo sapiens
  source 1..43: mol_type = other RNA
tgccaccagatgttcaccgaaggagaggaaatgtacctcacag

SEQ ID NO: 693 - RNA, 44 nt, Homo sapiens
  source 1..44: mol_type = other RNA
ctccactccaacctcttaccaggctcccaagcactttcacatcc

SEQ ID NO: 694 - RNA, 44 nt, Homo sapiens
  source 1..44: mol_type = other RNA
aaacaagtgaagacatcagccagacctccaagtacagtcccatc

SEQ ID NO: 695 - RNA, 41 nt, Homo sapiens
  source 1..41: mol_type = other RNA
agttctaccaagtctttggcatgaccatctctgagtttgac

SEQ ID NO: 696 - RNA, 39 nt, Homo sapiens
  source 1..39: mol_type = other RNA
tcaggcttcttcttcaagaaccaggagtacatctgcacc

SEQ ID NO: 697 - RNA, 38 nt, Homo sapiens
  source 1..38: mol_type = other RNA
gttaaagcatagacggacatctgaaacctccatctcac

SEQ ID NO: 698 - RNA, 40 nt, Homo sapiens
  source 1..40: mol_type = other RNA
cccaggtgatgagtgaggttcgaagaacggaagatttaaa

SEQ ID NO: 699 - RNA, 53 nt, Homo sapiens
  source 1..53: mol_type = other RNA
agtgcaaagacatcaccatgaacactagcattccttatcagcagaatccttac

SEQ ID NO: 700 - RNA, 38 nt, Homo sapiens
  source 1..38: mol_type = other RNA
cctgccatgagacttgcttttctgtactgtcaggcaag
